(19) United States
(12) Patent Application Publication
(10) Pub. No.: US 2007/0059697 A1
(43) Pub. Date: Mar. 15, 2007

(54) Determining cancer-linked genes and therapeutic targets using molecular cytogenetic methods

(75) Inventors: Jeffrey W. Strovel, North Potomac, MD (US); Colyn B. Cain, Bethesda, MD (US); Stephen K. Horrigan, Potomac, MD (US); Meena Augustus, Gaithersburg, MD (US)

Correspondence Address: CARELLA, BYRNE, BAIN, GILFILLAN, CECCHI,;STEWART & OLSTEIN, 5 BECKER FARM ROAD, ROSELAND, NJ, 07068, US

(73) Assignee: AVALON PHARMACEUTICALS, INC, Germantown, MD (US)

(21) Appl. No.: 10/553,098

(22) PCT Filed: Apr. 15, 2004
(86) PCT No.: PCT/US04/09289

§ 371 Date: Nov. 21, 2006

Related U.S. Application Data
(60) Provisional application No. 60/462,895, filed on Apr. 15, 2003.

(51) Int. Cl. C12Q 1/68; C12P 19/34

(52) U.S. Cl. 435/6; 435/91.2

(57) ABSTRACT

Methods for identifying potential therapeutic agents, such as anti-tumor agents, based on their modulation of the expression of specified genes, especially genes mapping to specific chromosomal regions, are disclosed. Also described are methods for diagnosing cancerous, or potentially cancerous, conditions as a result of the expression, or patterns of expression, of such genes, including detecting changes in levels of gene copy number and/or level of amplification of the said gene, or sets of genes, to detect and/or diagnose the cancer. Methods for detecting or determining functionally related genes, as well as methods for treating cancer based on targeting expression products of such genes, determining genes involved in the cancerous process and the success and/or response rates and survival statistics for cancer patients on treatment are encompassed by the invention. Also encompassed are methods involving determining the modulated expression of the genes in these regions of interest (ROIs) as pharmacodynamic/pharmacogenetic /surrogate markers and/or for patient profiling prior to accrual for clinical trials/treatments based on the identification of these genes as validated gene/drug targets in various cancer tissue types.

[0001] This application claims priority of U.S. Provisional Application Ser. No. 60/462,895, filed 15 Apr. 2003, the disclosure of which is hereby incorporated by reference in its entirety.

### FIELD OF THE INVENTION

[0002] The present invention relates to identification of genes whose disruption and/or change in expression is useful to distinguish cancerous from non-cancerous tissue and serve as potential therapeutic targets, pharmacodynamic/pharmacogenetic/surrogate and prognostic and diagnostic markers, and which genes are identified by high resolution Comparative Genomic Hybridization (CGH) and Spectral Karyotyping (SKY)/fluorescent in situ hybridization (FISH) analysis of DNA and chromosomes of various cancer cell lines and primary and metastatic tumor samples combined with gene expression analysis of these cells and tissues.

### BACKGROUND OF THE INVENTION

[0003] Chromosomal abnormalities have been identified in most cancer cells.

[0004] Conventional chromosome banding techniques allow for the detection of specific chromosomal defects in tumor cells but interpretation of the banding pattern is sometimes difficult, particularly when complex chromosomal rearrangements or subtle abnormalities are present. In recent years, new techniques, such as CGH and SKY, based on fluorescent in situ hybridization (FISH) (Pinkel et al., Proc Nat Acad Sci USA 85:9138-42 (1988)) have been developed to overcome the limitations of conventional chromosome banding. CGH measures intensities of fluorescently labeled tumor DNA and normal DNA following hybridization to normal chromosomes (Kallioniemi et al., Science 258:818-21 (1992)). Gain or loss of copy number of a particular chromosome or chromosome region in the tumor DNA is determined by the relative intensity of a fluorescence ratio. SKY utilizes a cocktail of chromosome probes, fluorescently labeled to specify each chromosome, which is hybridized to tumor chromosomes in an effort to identify numerical and structural abnormalities in the tumor cell (Schröck et al., Science 273:494-7 (1996)). CGH and SKY have been used to identify chromosomal regions that harbor genes significant to the process of tumor initiation or progression.

### BRIEF SUMMARY OF THE INVENTION

[0005] In one aspect the present invention relates to a set of genes that have been localized within human chromosomal regions of interest (ROI) that have been identified by molecular cytogenetic techniques.

[0006] In one aspect, the present invention relates to a method for diagnosing cancer in a mammal, especially a human patient, comprising determining amplification of a gene in the genome of a mammal wherein said gene is a gene of Table 1.

[0007] In a preferred embodiment thereof, the cancer is a member selected from breast cancer, colon cancer, lung cancer, prostate cancer, ovarian cancer, pancreatic cancer, cervical cancer and kidney cancer.

[0008] In another preferred embodiment thereof, 3. The method of claim 1 wherein said gene of Table 1 is a gene that encodes the same gene product as a polynucleotide selected from the polynucleotides of SEQ ID NO: 1-805 and 855-923.

[0009] In another embodiment, the present invention relates to a method for diagnosing cancer or a pre-cancerous condition in a mammal, comprising:

[0010] (a) obtaining a cell or tissue sample from a mammal, especially a human patient, suspected of having cancer or a pre-cancerous condition and determining for said sample the gene copy number of a gene of Table 1;

[0011] (b) comparing said gene copy number of step (a) to the gene copy number of the same gene from a sample of a corresponding cell or tissue from a mammal of the same species not having cancer of the type being diagnosed whereby a higher gene copy number determined in step (a) relative to that in step (b) indicates the presence of a cancer or pre-cancerous condition in the mammal of step (a) and results in a diagnosis of cancer or a pre-cancerous condition in said mammal.

[0012] In a preferred embodiment of the methods of the invention, said molecule is a member selected from an antisense DNA, an antisense RNA, a ribozyme and an siRNA.

[0013] In another embodiment, the present invention relates to a method for identifying an agent having therapeutic activity in a human patient in need of said therapeutic activity, comprising:

[0014] (a) determining in a sample from a patient the level of a gene product encoded by a gene of Table 1 prior to administering a test compound to said patient;

[0015] (b) administering said test compound to said patient;

[0016] (c) determining in a sample from said patient the level of a gene product encoded by the same the gene as in step (a)

[0017] wherein a decrease in the level of said gene product in step (c) relative to step (a) identifies said test compound as an agent having therapeutic activity.

[0018] In a further embodiment, the present invention relates to a method for identifying an antineoplastic agent, comprising:

[0019] (a) contacting a test compound with a cell that expresses a gene of Table 1; and

[0020] (b) determining a change in gene expression as a result of said contacting;

[0021] whereby said change in said gene expression identifies said test compound as an antineoplastic agent.

[0022] The present invention also relates to a method for determining the cancerous status of a cell, comprising determining elevated expression in said cell of a gene of Table 1 wherein elevated expression of said gene indicates that said cell is cancerous.

[0023] In an additional embodiment, the present invention relates to a method for identifying a compound as an anti-neoplastic agent, comprising:

[0024] (a) contacting a test compound with a polypeptide encoded by a gene of Table 1,

[0025] (b) determining a change in a biological activity of said polypeptide due to said contacting,

[0026] wherein a change in activity identifies said test compound as an agent having antineoplastic activity.

[0027] In a preferred embodiment of the foregoing, the polypeptide is an enzyme selected from kinase, protease, peptidase, phosphodiesterase, phosphatase, dehydrogenase, reductase, carboxylase. transferase, deacetylase and polymerase.

[0028] The present invention also relates to a method for identifying an anti-neoplastic agent comprising contacting a cancerous cell with a compound found to have anti-neoplastic activity in other the methods of the invention under conditions promoting the growth of said cell and detecting a change in the activity of said cancerous cell.

[0029] The present invention further relates to a method for treating cancer comprising contacting a cancerous cell with an agent having affinity for an expression product of a gene of Table 1 and in an amount effective to cause a reduction in cancerous activity of said cell.

[0030] The present invention also contemplates a method for monitoring the progress of cancer therapy in a patient comprising monitoring in a patient undergoing cancer therapy the expression of a gene of Table 1.

[0031] In addition, the present invention encompasses a method for determining the likelihood of success of cancer therapy in a patient, comprising monitoring in a patient undergoing cancer therapy the expression of a gene of Table 1 wherein a decrease in said expression prior to completion of said cancer therapy is indicative of a likelihood of success of said cancer therapy.

[0032] In another embodiment, the present invention relates to a method for producing test data with respect to the anti-neoplastic activity of a compound comprising:

[0033] (a) identifying a test compound as having anti-neoplastic activity using other methods of the invention;

[0034] (b) producing test data with respect to the anti-neoplastic activity of said test compound sufficient to identify the chemical structure of said test compound.

[0035] Additionally, the present invention encompasses a method for determining the progress of a treatment for cancer in a patent afflicted therewith, following commencement of a cancer treatment on said patient, comprising:

[0036] (a) determining in said patient a change in expression of one or more genes of Table 1; and

[0037] (b) determining a change in expression of said gene compared to expression of said one or more determined genes prior to said cancer treatment;

[0038] wherein said change in expression indicates progress of said treatment thereby determining the progress of said treatment.

### SEQUENCE LISTING ON CD-ROM ONLY

[0039] The sequences disclosed herein as SEQ ID NO: 1-923 in the sequence listing are contained on compact disc (CD-ROM) only, which accompanies this application and the contents of said CD-ROMs are hereby incorporated by reference in their entirety. These sequence numbers also appear in Table where all sequences are referred to as consecutive serial numbers for reference purposes only.

### DETAILED SUMMARY OF THE INVENTION

[0040] The present invention relates to a set of genes that are amplified and/or over-expressed genes in cancer cell lines and have been localized to various chromosomal regions of interest. These genes have been identified through a combination of CGH, SKY, expression analysis and Reverse Transcriptase-Polymerase Chain Reaction (RT-PCR). Such genes are both markers and potential therapeutic targets for cancer, in particular breast, colon, lung and prostate malignancies. In addition, the amplified nature of such genes provides a means of diagnosing a cancerous condition, or predisposition to a cancerous conditions, by determining the amplification of one or more of such genes in a patient afflicted with, or predisposed toward, or otherwise at risk of developing, cancer.

[0041] In accordance with the present invention, a number of genes have been localized to a chromosomal regions of interest as identified in Table 1 (serial number 1-229 (breast), 230-440 (colon), 441-656 (lung) and 657-805 (prostate), serial number 806-923 (transcript or protein)). The invention also includes any subsets of these. As described herein, these sequences include DNA sequences of SEQ ID NO: 1-805, transcripts with the sequences of SEQ ID NO: 855-923, and proteins/polypeptides with amino acid sequences of SEQ ID NO: 806-854.

[0042] Briefly, the procedures used to identify the genes disclosed herein may be summarized as follows:

[0043] For CGH analysis, based on detailed molecular cytogenetic characterizations, the following data sets are generated, which may include regions reported in the public domain as well as unique regions not previously known.
[0044] 1. A map of chromosomal regions involved in consistent, recurrent and high level genomic gains (i.e., amplifications) for a representative cancer cell line or tumor type (e.g. colon, prostate, breast and lung) that can be recognized as a pattern/signature for a given tumor type.
[0045] 2. A map of chromosomal regions containing genomic losses (i.e., deletions) in each tumor type and individual cell line to be examined.
[0046] 3. Levels of intensities of gains and losses categorized for entry into a database.
[0047] 4. A comparison of the patterns of gains and losses between the clinical samples (e.g. colon xenografts) and cell lines (e.g., colon) of matched Stages and Grades.
[0048] 5. A comparison of the patterns of gains and losses between primary prostate tumor cell lines (e.g., CPDR lines) and metastatic prostate tumor cell lines (e.g., DU 145, PC3 and LNCaP).

[0049] In accordance with the present invention, for SKY analysis, data sets were generated according to the following steps:
[0050] 1. Identification and development of a database of novel chromosomal rearrangements in epithelial cancer cell lines.
[0051] 2. Identification of novel translocations involving specific chromosomes or chromosomal regions
[0052] 3. Reconciliation of SKY and CGH analysis on the same cell line as a verification of the combined findings.

[0053] Combining genomic DNA analysis of gains and losses in the tumor cell lines/clinical samples with cDNA expression analysis from matched tumor types displayed on a genome template from the Golden Path genome browser using a Spotfire™ analysis tool:
[0054] 1. A pattern of gene expression on a U-95 Affymatix chip set obtained via the Gene Logic database was used to generate differential gene expression profiles between samples sets containing normal and. malignant tissues from colon, prostate, lung, breast and various cell lines.
[0055] 2. A Spotfire™ visualization tool was developed that allowed the generation of a list of all the genes that are present in the Golden Path within the clustered regions of gains/losses for each cell type/tumor type to generate the gene sets to include in the HITS platform
[0056] 3. The following algorithm was employed:
   [0057] i) Match chromosomal regions of amplification/gains defined by CGH with the location of genes/ESTs on an Affymatix chip as mapped to a Golden Path genome template.
   [0058] ii) Identify genes/ESTs over-expressed in tumor tissue compared to normal tissue in said chromosomal regions using the Gene Logic database.
   [0059] iii) Compile data on cell lines of a particular tumor type and different tumor types showing clusters of genomic gains and losses at certain chromosomal regions.
   [0060] iv) Pick BACs that span the chromosomal regions consistently gained and containing over-expressed genes in an effort to positionally clone novel cancer genes (oncogenes and genes in relevant pathways)
   [0061] v) Validate the identified genes by
      [0062] A) Picking STS markers that identify the gene sequence and quantify the relative copy number in genomic DNA and RNA across a panel of tumor cell lines.
      [0063] B) Develop probes for FISH on chromosomes from tumor cell lines and primary tumor tissue micro-arrays.
[0064] 4. The expression data from tumor cell lines that have undergone SKY/CGH analysis was used to pick candidate genes to validate as individual targets in functional genomic assays and in-vivo assays and for use in the transcriptional assay platform.

[0065] In accordance with the present invention, over-expression of cellular genes is conveniently monitored in model cellular systems using cell lines (such as is used in the example below), primary cells, or tissue samples maintained in growth media. For different purposes, these may be treated with compounds at one or more different concentrations to assay for modulating agents. Thus, cellular. RNAs were isolated from the cells or cultures as an indicator of selected gene expression. The cellular RNAs were then divided and subjected to analysis that detected the presence and/or quantity of specific RNA transcripts, which transcripts were then amplified for detection purposes using standard methodologies, such as reverse transcriptase polymerase chain reaction (RT-PCR). The levels of specific RNA transcripts, including their presence or absence, were determined. When used for identification of modulating agents, such as ant-neoplastic agents, a metric is derived for the type and degree of response of the treated sample compared to control samples.

[0066] In accordance with the foregoing, the genes identified as being amplified and/or over-expressed, which can include increased copy number thereof, in cancerous cells are localized in chromosomal regions of interest as identified in Table 1 (serial number 1-229 (breast), 230440 (colon), 441-656 (lung) and 657-805 (prostate); for polypeptide SEQ ID NOs, see Table 1, serial number 806-923 (transcript or protein)).

[0067] These genes may be utilized to characterize, the cancerous, or non-cancerous, status of cells, or tissues. The methods of the invention may be used with a variety of cell lines or with primary samples from tumors maintained in vitro under suitable culture conditions for varying periods of time, or in situ in suitable animal models.

[0068] The genes disclosed herein are expressed at levels in cancer cells that are different from the expression levels in non-cancer cells. These genes as identified in Table 1 are amplified in cancer cells relative to non-cancer cells of corresponding tissues, especially breast cancer, colon cancer, lung cancer, prostate cancer, ovarian cancer, pancreatic cancer, cervical cancer and kidney cancer.

[0069] In accordance with the foregoing, the present invention relates to a method for diagnosing cancer in a mammal, comprising determining amplification of a gene in the genome of a mammal wherein said gene is a gene of Table 1.

[0070] In a preferred embodiment thereof, said gene of Table 1 is a gene that encodes the same gene product as a polynucleotide selected from the polynucleotides of SEQ ID NO: 1-805 and 855-923. In a further preferred embodiment, said mammal is a human patient.

[0071] The present invention is also directed to a method for diagnosing cancer or a pre-cancerous condition in a mammal, preferably a human patient, comprising:

[0072] (a) obtaining a cell or tissue sample from a mammal suspected of having cancer or a pre-cancerous condition and determining for said sample the gene copy number of a gene of Table 1;

[0073] (b) comparing said gene copy number of step (a) to the gene copy number of the same gene from a sample of a corresponding cell or tissue from a mammal of the same species not having cancer of the type being diagnosed

[0074] whereby a higher gene copy number determined in step (a) relative to that in step (b) indicates the presence of a cancer or pre-cancerous condition in the mammal of step (a) and results in a diagnosis of cancer or a pre-cancerous condition in said mammal.

[0075] In specific embodiments, the cancer to be diagnosed is one or more of breast cancer, colon cancer, lung cancer, prostate cancer, ovarian cancer, pancreatic cancer, cervical cancer and kidney cancer.

[0076] Preferably, the gene of Table 1 is a gene that encodes the same gene product as a polynucleotide of SEQ ID NO: 1-805 and 855-923.

[0077] The present invention is also directed to a method of inhibiting cancer, or a pre-cancerous condition, in a mammalian cell, comprising contacting said cell with a molecule that inhibits function of a gene of Table 1. Preferably, the gene of Table 1 is a gene that encodes the same gene product as a polynucleotide of SEQ ID NO: 1-805 and 855-923. In a specific embodiment thereof, said molecule inhibits gene function by binding to said gene. In other embodiments, the molecule inhibits gene function by binding to an RNA encoded by said gene or inhibits gene function by binding to polypeptide encoded by said gene. Preferably, the molecule is a member selected from an antisense DNA, an antisense RNA, a ribozyme and an siRNA. Also preferred is where the cancer is a member selected from breast cancer, colon cancer, lung cancer, prostate cancer, ovarian cancer, pancreatic cancer, cervical cancer and kidney cancer.

[0078] The invention contemplates that such contacting occurs in vivo.

[0079] The invention also relates to a method for identifying an agent having therapeutic activity in a human patient in need of said therapeutic activity, comprising:

[0080] (a) determining in a sample from a patient the level of a gene product encoded by a gene of Table 1 prior to administering a test compound to said patient;

[0081] (b) administering said test compound to said patient;

[0082] (c) determining in a sample from said patient the level of a gene product encoded by the same the gene as in step (a)

[0083] wherein a decrease in the level of said gene product in step (c) relative to step (a) identifies said test compound as an agent having therapeutic activity.

[0084] Preferably, said therapeutic activity is anticancer activity and said cancer is one or more of breast cancer, colon cancer, lung cancer, prostate cancer, ovarian cancer, pancreatic cancer, cervical cancer and kidney cancer.

[0085] Also preferred is where said gene product is an RNA or a polypeptide, especially where an activity of the polypeptide is determined, preferably an enzyme activity. In specific embodiments, said gene of Table 1 is a gene that encodes the same gene product as a polynucleotide of SEQ ID NO: 1-805 and 855-923, as well as where said molecule is a member selected from an antisense DNA, an antisense RNA, a ribozyme and an siRNA.

[0086] The present invention also relates to a method for identifying an antineoplastic agent, comprising:

[0087] (a) contacting a test compound with a cell that expresses a gene of Table 1; and

[0088] (b) determining a change in gene expression as a result of said contacting;

[0089] whereby said change in said gene expression identifies said test compound as an antineoplastic agent.

[0090] Most preferred is where the change in expression is a decrease in expression. The contacting may occur in vivo. Also preferred is where said gene of Table 1 encodes the same gene product as a polynucleotide of SEQ ID NO: 1-805 and 855-923 and where said molecule is a member selected from an antisense DNA, an antisense RNA, ribozyme, an siRNA, a small organic molecule and an antibody.

[0091] The present invention also relates to a method for determining the cancerous status of a cell, comprising determining elevated expression in said cell of a gene of Table 1 wherein elevated expression of said gene indicates that said cell is cancerous. Preferably, wherein said elevated expression is an elevated copy number of the gene and wherein said gene of Table 1 encodes the same gene product as a polynucleotide of SEQ ID NO: 1-805 and 855 -923.

[0092] The present invention further relates to a method for identifying a compound as an anti-neoplastic agent, comprising:

[0093] (a) contacting a test compound with a polypeptide encoded by a gene of Table 1,

[0094] (b) determining a change in a biological activity of said polypeptide due to said contacting,

[0095] wherein a change in activity identifies said test compound as an agent having antineoplastic activity.

[0096] Preferably, said gene of Table encodes the same gene product as a polynucleotide of SEQ ID NO: 1-805 and 855-923.

[0097] In a preferred embodiment, the change in biological activity is a decrease in biological activity.

[0098] In another preferred embodiment, the biological activity is an enzyme activity, such as where the enzyme is one selected from the group kinase, protease, peptidase, phosphodiesterase, phosphatase, dehydrogenase, reductase, carboxylase. transferase, deacetylase and polymerase.

[0099] Assays for these enzymes are available, such as for phosphodiesterases (the most pharmacologically relevant phosphodiesterases are those that hydrolyze cyclic nucleotides (see, for example, cAMP and cGMP assays available from Perkin-Elmer, as well as Estrade et al., Eur. J. Pharmacol. 352:2-3, 157-163 (1998)).

[0100] Protein phosphatases remove phosphate residues from proteins. Most tests of their activity use the same assays as for protein kinases. A non-radioactive phosphatase assay system is available from Promega Biotech.

[0101] The therapeutically most relevant dehydrogenases oxidize or reduce small molecular weight metabolites, esp. steroid hormones, or that generally use or generate NAD or NADP (see: Haeseleer et al., J. Biol. Chem., 273:21790-21799 (1998)). A commercial assay is available from Cayman Chemical (at www.caymanchem.com).

[0102] Gamma-carboxylases are important enzymes in the blood coagulation process. The main assay protocols use synthetic peptides (see: Ulrich et al., J. Biol. Chem., 263:9697-9702 (1988); Begley et al., J. Biol. Chem., 275:36245-36249 (2000)).

[0103] In highly preferred embodiments, the kinase is one of a protein kinase, a serine or threonine kinase, or a receptor tyrosine protein kinase. Where the polypeptide encoded by a gene of the invention is a protein kinase, especially involving tyrosine kinase, various assays for activity are available. Protein kinases add phosphate groups to serine, threonine or tyrosine residues on proteins, most commonly measured with phospho-serine, threonine, or tyrosine-specific antibodies, or generation of radiolabeled substrate, or consumption of ATP, or phosphorylation of (synthetic) small peptides, or measuring downstream enzyme activity and gene transcription. Such assays are commercially available. (See, for example, the tyrosine kinase assay from Roche Molecular Biochemicals). Assays for serine/threonine kinases are also available at Chromagen.com, Upstate Biotechnology, Inc. (Lake Placid, N.Y., and at upstatebiotech.com) and from Applied BioSystems (Foster City, Calif. (home.appliedbiosystems.com)).

[0104] In other specific embodiments, the protease is a serine protease, cysteine protease or aspartic acid protease, or the transferase is a methyltransferase, preferably a cytosine methyltransferase or an adenine methyltransferase, or the deacetylase is a histone deacetylase, or the carboxylase is a γ-carboxylase, or the peptidase is a zinc peptidase, or the polymerase is a DNA polymerase or an RNA polymerase.

[0105] Proteases degrade proteins, un-specifically or at specific sites. Almost all pharmacologically relevant ones have very narrowly defined specific substrates, and their activity is most often measured by directly measuring cleavage product or generation of (fluorescent) light after cleavage of synthetic substrates. Assays are available for serine proteases (Calbiochem, Palo Alto, Calif., and see Berdichevsky et al., J. Virol. Methods, 107:245-255 (2003), for systeine proteases (See: Schulz et al., Mol. Pathol., 51:222-24 (1998) and Seizer et al., PNAS, 96:11015-11022 (1999)), for aspartic acid proteases (Geno Tech, Inc. at www.genotech.com) and for zinc peptidases (see Evans et al., J. Biol. Chem., 278:23180-23186 (2003)).

[0106] Both (regulatory) DNA-methylases and (biosynthetic) protein methylases that are drug targets. (See: Jonassen and Clarke, J. Biol. Chem., 275:12381-12387 (2000); Jackson et al., Nature, 416:556-560 (2002)).

[0107] Most HDAC (histone deacetylase) assays use colorimetric or fluorometric (synthetic) substrates. Standard assays are for binding, especially molecular size changes, blocking a specific site, and effects on transcription or downstream reactions (if DNA or RNA is the direct target of a drug). A commercial assay is available from Vinci Biochem (at www.vincibiochem.it).

[0108] In another specific embodiment, the biological activity is a membrane transport activity, preferably wherein the polypeptide is a cation channel protein, an anion channel protein, a gated-ion channel protein or an ABC transporter protein. Drug effects on the activity of transporter and channel proteins are screened by measuring increase or decrease of the ((radio-)labeled) transported entity inside or outside the cell, in cell-based assays, ATP consumption (in the case of ATPases), or changes in cell membrane potential. Assays employing such proteins are available, such as for ABC transporter (see: Marcil et al., Lancet, 354:1341-46 (1999) and for ion channels (from Evotec OAI, at www.evotecoai.com and from PharmaLinks, at www.pharmalinks.org/research/cellsignalling).

[0109] In one embodiment, the polypeptide is an integrin (the signal transduction pathways elicited by the integrins are slow and not very well characterized, hence most assays are either just binding assays or measure downstream biological phenomena (such as migration, invasion, etc.) (See: Ganta et al., Endocrinology, 138:3606-3612 (1997); Sim et al., J. Biomed. Mater. Research, 68A:352-359 (2004); and Weinreb et al., Anal. Biochem., 306:305-313 (2002)), or a Cytochrome P450 enzyme (almost all cytochrome assays require knowledge of what the substrate is and measure conversion of substrate (free or (radio-)labeled) or generation of product; useful C¹⁴-labeled substrates are available from Amersham Biosciences at wwwl.amershambiosciences.com), or a nuclear hormone receptor (Assays available from Discoverx, Fremont, Calif., such as an estrogen assay; also see Rosen et al., Curr. Opin. Drug. Discov. Devel., 6:224-30 (2003)).

[0110] In one preferred embodiment, the biological activity is a receptor activity, preferably where the receptor is a G-protein-coupled receptor (GPCR).

[0111] GPCRs are transmembrane proteins that wind 7 times back and forth through a cell's plasma membrane with a ligand binding site located on the outside of the membrane surface of the cell and the effector site being present inside the cell. These receptors bind GDP and GTP. In response to ligand binding, GPCRs activate signal transduction pathways which induce a number of assayable physiological changes, e.g., an increase in intracellular calcium levels, cyclic-AMP, inositol phosphate turnover, and downstream gene transcription (directly or via reporter-assays) along with other translocation assays available for measuring GPCR activation when the polypeptide encoded by a gene of the invention is a GPCR. Thus, such proteins work through a second messenger. The result is activation of CREB, a transcription factor that stimulates the production of gene products. One useful assay is the so-called BRET2/arrestin assay, useful in screening for compounds that interact with GPCRs. (See: Bertrand et al, J. Recept. Signal Transduct Res., 22:533-41 (February-November 2002)). In addition, numerous assays are commercially available, such as the Transfluor Assay, available from Norak Biosciences, Inc. (www.norakbio.com) or ArrayScan and KineticScan, both from Cellomics, or assays from CyBio (Jena, Germany).

[0112] Assays useful with the invention are usually set up to screen for agonists or antagonists after adding ligand, but effects on most of these parameters can be measured whether or not the ligand for the receptor is known. Such assays may involve radioligand-binding assays. Activation of the majority of GPCRs by agonists leads to the interaction of beta-arrestin (a protein that is involved in receptor desensitization and sequestration) with the receptor, which is measurable by fluorescence energy transfer

[0113] The disclosure of all journal articles, or other publications, referred to herein are hereby incorporated by reference in their entirety.

[0114] In one embodiment, the polypeptide is in a solution or suspension and contact with the test compound is by direct contact between the test compound and the protein molecule. Alternatively, the polypeptide may be in a cell and the test compound may have to diffuse into the cell in order to contact the polypeptide. In an alternative embodiment, the test compound may be contacted with a cell that contains or expresses the polypeptide but the test compound may have no direct contact with the polypeptide. In stead, the test compound may act to induce production and/or activity of a different compound, such as an intracellular second messenger that serves to contact the polypeptide and modulate or change the biological activity of this polypeptide.

[0115] In accordance with the foregoing, the method of the present invention includes cancer modulating agents that are themselves either polypeptides, or small chemical entities, that affect the cancerous process, including initiation, suppression or facilitation of tumor growth, either in vivo or ex vivo. Such agents may also be antibodies that react with one or more polypeptides encoded by genes as disclosed herein, preferably polypeptides comprising any one of the amino acid sequences of SEQ ID NO: 806-854.

[0116] Because the genes disclosed herein are over-expressed and relate to the cancerous condition of a cell, successful anti-neoplastic activity will commonly be exhibited by agents that reduce the expression of said genes as identified in Table 1. In one embodiment thereof, the change in expression is a decrease in copy number of the gene or genes under study. In accordance therewith, said change in gene copy number is conveniently determined by detecting a change in expression of messenger RNA encoded by said gene sequence. In another preferred embodiment, expression is determined for more than one such gene, such as 2, 5, 10 or more of the genes.

[0117] Other methods useful in measuring a change in expression of the genes disclosed herein include measuring a change in the amount or rate of synthesis of a polypeptide encoded by said gene, preferably a decrease in synthesis of said polypeptide. Most preferably, the polypeptide comprises an amino acid sequence highly homologous to a sequence for genes as identified in Table 1 (SEQ ID NO: 1-923).

[0118] The methods of the invention can thus be utilized to identify anti-neoplastic agents useful in treatment of cancerous conditions. Such activity can be further modified by first identifying such an agent using an assay as already described and further contacting such agent with a cancerous cell, followed by monitoring of the status of said cell, or cells. A change in status indicative of successful anti-neoplastic activity may include a decrease in the rate of replication of the cancerous cell(s), a decrease in the total number of progeny cells that can be produced by said cancerous cell(s), or a decrease in the number of times said cancerous cell(s) can replicate, or the death of said cancerous cell(s).

[0119] Anti-neoplastic agents may also be identified using recombinant cells suitably engineered to contain and express the cancer-related genes disclosed herein. In one such embodiment, a recombinant cell is formed using standard technology and then utilized in the assays disclosed herein. Methods of forming such recombinant cells are well known in the literature. See, for example, Sambrook, et al., Molecular Cloning: A Laboratory Manual, Second Edition, Cold Spring Harbor, N.Y., (1989), Wu et al, Methods in Gene Biotechnology (CRC Press, New York, N.Y., 1997), and Recombinant Gene Expression Protocols, in Methods in Molecular Biology, Vol. 62, (Tuan, ed., Humana Press, Totowa, N.J., 1997), the disclosures of which are hereby incorporated by reference.

[0120] The present invention also relates to a method for detecting the cancerous status of a cell, comprising detecting elevated copy number and/or expression in said cell of at least one gene that maps to the chromosomal region of interest as identified in Table 1 (SEQ ID NO: 1-923). Such elevated expression may be readily monitored by comparison to that of otherwise normal cells having the same genes. Elevated expression of these genes is indicative of the cancerous state. This includes a gene corresponding to a polynucleotide that comprises a nucleotide sequence as identified in Table 1 (SEQ ID NO: 1-923). Such elevated expression, including increased copy number, may be the expression of more than one such gene.

[0121] The present invention also relates to a method for detecting a cancer-linked gene comprising the steps of contacting a compound identified as having gene modulating activity for a gene corresponding to a polynucleotide that comprises a nucleotide sequence as identified in Table 1 (SEQ ID NO: 1-923) with a cell expressing a test gene and detecting modulation, such as decreased activity, of such test gene relative to when said compound is not present thereby identifying said test gene as a cancer-related gene. In preferred embodiments, the gene determined by said method is an oncogene, or cancer facilitating gene.

[0122] In another embodiment, there is provided a method for treating cancer comprising contacting a cancerous cell with an agent first identified as having gene modulating activity using any of the assay methods disclosed according to the invention and in an amount effective to reduce the cancerous activity of said cell. In a preferred embodiment, the cancerous cell is contacted in vivo. In other preferred embodiments, said reduction in cancerous activity is a decrease in the rate of proliferation of said cancerous cell, or said reduction in cancerous activity is the death of said cancerous cell.

[0123] The present invention further relates to a method for treating cancer comprising contacting a cancerous cell with an agent having activity against an expression product encoded by a gene corresponding to a polynucleotide comprising a nucleotide sequence as identified in Table 1 (SEQ ID NO: 1-923) where the product is a polypeptide, most preferably one comprising an amino acid sequence as identified in Table 1 (SEQ ID NO: 806-854). In a preferred embodiment, said cancerous cell is contacted in vivo. In another preferred embodiment, the agent is an antibody.

[0124] As noted, the genes useful in the assay methods include genes mapping within chromosomal regions of interest and genes as identified in Table 1 (SEQ ID NO: 1-923), or a gene that encodes the same RNA, such as the same messenger RNA, whose corresponding cDNA is one of the sequences as identified in Table 1 (SEQ ID NO: 1-923). The genes useful in the methods of the invention further include genes encoding RNAs whose corresponding cDNA is at least 90% identical to a sequence as identified in Table 1 (SEQ ID NO: 1-923), preferably at least about 95% identical to such a sequence, more preferably at least about 98% identical to such sequence and most preferably one comprising that sequence are specifically contemplated by all of the methods of the present invention.

[0125] In addition, sequences encoding the same proteins (SEQ ID NO: 806-854) as any of these sequences, regardless of the percent identity of such sequences, are also specifically contemplated by the invention.

[0126] The sequences disclosed herein may be genomic in nature and thus represent the sequence of an actual gene, such as a human gene, or may be a cDNA sequence derived from a messenger RNA (mRNA) and thus represent contiguous exonic sequences derived from a corresponding genomic sequence or they may be wholly synthetic in origin for purposes of testing. As described in the Example, the expression of these cancer-related genes is determined from the relative expression levels of the RNA complement of a cancerous cell relative to a normal (i.e., non-cancerous) cell. Because of the processing that may take place in transforming the initial RNA transcript into the final mRNA, the sequences disclosed herein may represent less than the full genomic sequence. They may also represent sequences derived from ribosomal and transfer RNAs. Consequently, the genes present in the cell (and representing the genomic sequences) and the sequences disclosed herein, which are mostly cDNA sequences, may be identical or may be such that the cDNAs contain less than the full genomic sequence. Such genes and cDNA sequences are still considered corresponding sequences because they both encode similar RNA sequences. Thus, by way of non-limiting example only, a gene that encodes an RNA transcript, which is then processed into a shorter mRNA, is deemed to encode both such RNAs and therefore encodes an RNA complementary to (using the usual Watson-Crick complementarity rules), or that would otherwise be encoded by, a cDNA (for example, a sequence as disclosed herein). Thus, the sequences disclosed herein correspond to genes contained in the cancerous or normal cells used to determine relative levels of expression because they represent the same sequences or are complementary to RNAs encoded by these genes. Such genes also include different alleles and splice variants that may occur in the cells used in the methods of the invention.

[0127] The genes of the invention “correspond to” a polynucleotide having a sequence as identified in Table 1 (SEQ ID NO: 1-923) if the gene encodes an RNA (processed or unprocessed, including naturally occurring splice variants and alleles) that is at least 90% identical, preferably at least 95% identical, most preferably at least 98% identical to, and especially identical to, an RNA that would be encoded by, or be complementary to, such as by hybridization with, a polynucleotide having the indicated sequence. In addition, genes including sequences at least 90% identical to a sequence as identified in Table 1 (SEQ ID NO: 1-923), preferably at least about 95% identical to such a sequence, more preferably at least about 98% identical to such sequence and most preferably comprising such sequence are specifically contemplated by all of the methods of the present invention as being genes that correspond to these sequences. In addition, sequences encoding the same proteins as any of these sequences, regardless of the percent identity of such sequences, are also specifically contemplated by any of the methods of the present invention that rely on any or all of said sequences, regardless of how they are otherwise described or limited. Thus, any such sequences are available for use in carrying out any of the methods disclosed according to the invention. Such sequences also include any open reading frames, as defined herein, present within any of the sequences as identified in Table 1 (SEQ ID NO: 1-805 and 855-923).

[0128] Further in accordance with the present invention, the term “percent identity” or “percent identical,” when referring to a sequence, means that a sequence is compared to a claimed or described sequence after alignment of the sequence to be compared (the “Compared Sequence”) with the described or claimed sequence (the “Reference Sequence”). The Percent Identity is then determined according to the following formula:
Percent Identity=100[1−(C/R)]
wherein C is the number of differences between the Reference Sequence and the Compared Sequence over the length of alignment between the Reference Sequence and the Compared Sequence wherein (i) each base or amino acid in the Reference Sequence that does not have a corresponding aligned base or amino acid in the Compared Sequence and (ii) each gap in the Reference Sequence and (iii) each aligned base or amino acid in the Reference Sequence that is different from an aligned base or amino acid in the Compared Sequence, constitutes a difference; and R is the number of bases or amino acids in the Reference Sequence over the length of the alignment with the Compared Sequence with any gap created in the Reference Sequence also being counted as a base or amino acid.

[0129] If an alignment exists between the Compared Sequence and the Reference Sequence for which the percent identity as calculated above is about equal to or greater than a specified minimum Percent Identity then the Compared Sequence has the specified minimum percent identity to the Reference Sequence even though alignments may exist in which the hereinabove calculated Percent Identity is less than the specified Percent Identity.

[0130] As used herein, the terms “portion,” “segment,” and “fragment,” when used in relation to polypeptides, refer to a continuous sequence of residues, such as amino acid residues, which sequence forms a subset of a larger sequence. For example, if a polypeptide were subjected to treatment with any of the common endopeptidases, such as trypsin or chymotrypsin, the oligopeptides resulting from such treatment would represent portions, segments or fragments of the starting polypeptide. When used in relation to a polynucleotide, such terms refer to the products produced by treatment of said polynucleotides with any of the common endonucleases, or any stretch of polynucleotides that could be synthetically synthesized.

[0131] As used herein, the term “DNA segment” or “DNA sequence” refers to a DNA polymer, in the form of a separate fragment or as a component of a larger DNA construct, which has been derived from DNA, and may include both single stranded and duplex sequences. Such segments are provided in the form of an open reading frame uninterrupted by internal non-translated sequences, or introns, which are typically present in eukaryotic genes.

[0132] The term “coding region” refers to that portion of a gene which either naturally or normally codes for the expression product of that gene in its natural genomic environment, i.e., the region coding in vivo for the native expression product of the gene.

[0133] The term “nucleotide sequence” refers to a heteropolymer of deoxyribonucleotides. Generally, DNA segments encoding the proteins provided by this invention are assembled from cDNA fragments and short oligonucleotide linkers, or from a series of oligonucleotides, to provide a synthetic gene which is capable of being expressed in a recombinant transcriptional unit comprising regulatory elements derived from a microbial or viral operon.

[0134] The term “expression product” means that polypeptide or protein that is the natural translation product of the gene and any nucleic acid sequence coding equivalents resulting from genetic code degeneracy and thus coding for the same amino acid(s).

[0135] The term “fragment,” when referring to a coding sequence, means a portion of DNA comprising less than the complete coding region whose expression product retains essentially the same biological function or activity as the expression product of the complete coding region.

[0136] The present invention also finds use as a means of diagnosing the presence of cancer in a patient, as where a sample of cancerous tissues or cells, or tissues or cells suspected of being cancerous. For such purposes, and in accordance with the disclosure elsewhere herein, such diagnosis is based on the detection of elevated expression or amplification, such as elevated copy number, of one or more of the genes identified according to the invention. Such elevated expression can be determined by any of the means described herein.

[0137] In one such embodiment, the elevated expression, as compared to normal cells and/or tissues of the same organ, is determined by measuring the relative rates of transcription of RNA, such as by production of corresponding cDNAs and then analyzing the resulting DNA using probes developed from the gene sequences as identified in Table 1. Thus, the levels of cDNA produced by use of reverse transcriptase with the full RNA complement of a cell suspected of being cancerous produces a corresponding amount of cDNA that can then be amplified using polymerase chain reaction, or some other means, such as rolling circle amplification, to determine the relative levels of resulting cDNA and, thereby, the relative levels of gene expression.

[0138] For RNA analysis, the latter may be isolated from samples in a variety of ways, including lysis and denaturation with a phenolic solution containing a chaotropic agent (e.g., triazol) followed by isopropanol precipitation, ethanol wash, and resuspension in aqueous solution; or lysis and denaturation followed by isolation on solid support, such as a Qiagen resin and reconstitution in aqueous solution; or lysis and denaturation in non-phenolic, aqueous solutions followed by enzymatic conversion of RNA to DNA template copies. Steady state RNA levels for a given type of cell or tissue may have to be ascertained prior to employment of the methods of the invention but such is well within the skill of those in the art and will not be further described in detail herein.

[0139] Alternatively, increased expression, such as increased copy number, may be determined for the genes present in a cancerous cell, or a cell suspected of being cancerous, by using the nucleotides sequences as identified in Table 1 as a means of generating probes for the DNAs present in the cells to be examined. Thus, the DNA of such cells may be extracted and probed using the sequences disclosed herein for the presence in the genomes of such cells of increased amounts of one or more of the genes of the invention. For example, where a cancer-related, or cancer-linked, gene as disclosed herein is found to be present in multiple copies within the genome of a cell, even where it may not be actively being over-expressed at the time of such determination, this may be indicative of at least a disposition toward developing cancer at a subsequent time.

[0140] In accordance with the foregoing, the presence of such multiple copies of a gene, or genes, as disclosed herein may be determined using northern or southern blotting and employing the sequences as identified in Table 1 to develop probes for this purpose. Such probes may be composed of DNA or RNA and may advantageously be comprised of a contiguous stretch of nucleotide residues matching, or complementary to, a sequence as identified in Table 1. Such probes will most usefully comprise a contiguous stretch of at least 15, preferably at least 30, more preferably at least 50, most preferably at least 80, and especially at least 100, even 200 residues, derived from one or more of the sequences as identified in Table 1. Thus, where a single probe binds multiple times to the genome of a sample of cells that are cancerous, or are suspected of being cancerous, or predisposed to become cancerous, whereas binding of the same probe to a similar amount of DNA derived from the genome of otherwise non-cancerous cells of the same organ or tissue results in observably less binding, this is indicative of the presence of multiple copies of a gene comprising, or corresponding to, the sequence as identified in Table 1 from which the probe sequenced was derived.

[0141] Increased expression may also be determined using agents that selectively bind to, and thereby detect, the presence of expression products of the genes disclosed herein. For example, an antibody, possibly a suitably labeled antibody, such as where the antibody is bound to a fluorescent or radiolabel, may be generated against one of the polypeptides comprising a sequence as identified in Table 1 (serial number 1-229 (breast), 230-440 (colon), 441-656 (lung) and 657-805 (prostate); for polypeptide SEQ ID NOs, see Table 1, serial number 806-923 (transcript or protein)), and said antibody will then react with, binding either selectively or specifically, to a polypeptide encoded by one of the genes that corresponds to a sequence disclosed herein. Such antibody binding, especially relative extent of such binding in samples derived from suspected cancerous, as opposed to otherwise non-cancerous, cells and tissues, can then be used as a measure of the extent of expression, or over-expression, of the cancer-related genes identified herein. Thus, the genes identified herein as being over-expressed in cancerous cells and tissues may be over-expressed due to increased copy number, or due to over-transcription, such as where the over-expression is due to over-production of a transcription factor that activates the gene and leads to repeated binding of RNA polymerase, thereby generating large than normal amounts of RNA transcripts, which are subsequently translated into polypeptides, such as the polypeptides comprising amino acid sequences as identified in table 1)SEQ ID NO: 1-923). Such analysis provides an additional means of ascertaining the expression of the genes identified according to the invention and thereby determining the presence of a cancerous state in a sample derived from a patient to be tested, of the predisposition to develop cancer at a subsequent time in said patient.

[0142] In employing the methods of the invention, it should be borne in mind that gene expression indicative of a cancerous state need not be characteristic of every cell found to be cancerous. Thus, the methods disclosed herein are useful for detecting the presence of a cancerous condition within a tissue where less than all cells exhibit the complete pattern of over-expression. For example, a set of selected genes, comprising sequences homologous under stringent conditions, or at least 90%, preferably 95%, identical to at least one of the sequences as identified in Table 1, may be found, using appropriate probes, either DNA or RNA, to be present in as little as 60% of cells derived from a sample of tumorous, or malignant, tissue while being absent from as much as 60% of cells derived from corresponding non-cancerous, or otherwise normal, tissue (and thus being present in as much as 40% of such normal tissue cells). In a preferred embodiment, such gene pattern is found to be present in at least 70% of cells drawn from a cancerous tissue and absent from at least 70% of a corresponding normal, non-cancerous, tissue sample. In an especially preferred embodiment, such gene pattern is found to be present in at least 80% of cells drawn from a cancerous tissue and absent from at least 80% of a corresponding normal, non-cancerous, tissue sample. In a most preferred embodiment, such gene pattern is found to be present in at least 90% of cells drawn from a cancerous tissue and absent from at least 90% of a corresponding normal, non-cancerous, tissue sample. In an additional embodiment, such gene pattern is found to be present in at least 100% of cells drawn from a cancerous tissue and absent from at least 100% of a corresponding normal, non-cancerous, tissue sample, although the latter embodiment may represent a rare occurrence.

[0143] In an additional aspect, the present invention relates to a method for determining a cancer initiating or facilitating gene comprising contacting a cell expressing a test gene (i.e., a gene whose status as a cancer initiating or facilitating gene is to be determined) with an agent that decreases the expression of a gene that encodes an RNA at least 90%, preferably 95%, identical to an RNA encoded by (i.e., a gene corresponding to) a polynucleotide comprising, or having, a sequence selected from the group consisting as identified in Table 1 and detecting a decrease in expression of said test gene compared to when said agent is not present, thereby identifying said test gene as being a cancer initiating or facilitating gene. Such genes may, of course, be oncogenes and said decrease in expression may be due to a decrease in copy number of said gene in said cell or a cell derived from said cell, such as where copy number is reduced in the cells formed by replication of such cells.

[0144] Thus, some or all of the genes disclosed herein as corresponding to as identified in Table 1 are found to play a direct role in the initiation or progression of cancer or even other diseases and disease processes. Because changes in expression of these genes (up-regulation) are linked to the disease state (i.e. cancer), the change in expression may contribute to the initiation or progression of the disease. For example, if a gene that is up-regulated is an oncogene such a gene provides for a means of screening for small molecule therapeutics beyond screens based upon expression output alone. For example, genes that display up-regulation in cancer and whose elevated expression contributes to initiation or progression of disease represent targets in screens for small molecules that inhibit or block their function. Examples include, but are not be limited to, kinase inhibition, cellular proliferation, substrate analogs that block the active site of protein targets, etc.

[0145] It should be noted that there are a variety of different contexts in which genes have been evaluated as being involved in the cancerous process. Thus, some genes may be oncogenes and encode proteins that are directly involved in the cancerous process and thereby promote the occurrence of cancer in an animal. Other genes may simply be involved either directly or indirectly in the cancerous process or condition and may serve in an ancillary capacity with respect to the cancerous state. All such types of genes are deemed with those to be determined in accordance with the invention as disclosed herein. Thus, the gene determined by said method of the invention may be an oncogene, or the gene determined by said method may be a cancer facilitating gene, the latter including a gene that directly or indirectly affects the cancerous process, either in the promotion of a cancerous condition or in facilitating the progress of cancerous growth or otherwise modulating the growth of cancer cells, either in vivo or ex vivo. Such genes may work indirectly where their expression alters the activity of some other gene or gene expression product that is itself directly involved in initiating or facilitating the progress of a cancerous condition. For example, a gene that encodes a polypeptide, either wild or mutant in type, which polypeptide acts to suppress of tumor suppressor gene, or its expression product, will thereby act indirectly to promote tumor growth.

[0146] In accordance with the foregoing, the method of the present invention includes cancer modulating agents that are themselves either polypeptides, or small chemical entities, that affect the cancerous process, including initiation, suppression or facilitation of tumor growth, either in vivo or ex vivo. Such agents may also be antibodies that react with one or more of the polypeptides as identified in Table 1 ((SEQ ID NO: 806-923 (transcript or protein)).

[0147] In keeping with the disclosure herein, the present invention also relates to a method for treating cancer comprising contacting a cancerous cell with an agent having activity against an expression product encoded by a gene mapping within regions of chromosomal interest or, alternatively, a gene corresponding to a polynucleotide that comprises a nucleotide sequence as identified in Table 1, such as where such expression product is one the polypeptides as identified in Table 1.

[0148] The method of the present invention includes embodiments of the above-recited method wherein said cancer cell is contacted in vivo as well as ex vivo, preferably wherein said agent comprises a portion, or is part of an overall molecular structure, having affinity for said expression product. In one such embodiment, said portion having affinity for said expression product is an antibody.

[0149] In one embodiment of the present invention, a chemical agent, such as a protein or other polypeptide, is joined to an agent, such as an antibody, having affinity for an expression product of a cancerous cell, such as a polypeptide or protein encoded by a gene related to the cancerous process, especially a gene sequence corresponding to one of the cDNA sequences as identified in Table 1. In a specific embodiment, said expression product acts as a therapeutic target for the affinity portion of said anticancer agent and where, after binding of the affinity portion of such agent to the expression product, the anti-cancer portion of said agent acts against said expression product so as to neutralize its effects in initiating, facilitating or promoting tumor formation and/or growth. In a separate embodiment of the present invention, binding of the agent to said expression product may, without more, have the effect of deterring cancer promotion, facilitation or growth, especially where the presence of said expression product is related, either intimately or only in an ancillary manner, to the development and growth of a tumor. Thus, where the presence of said expression product is essential to tumor initiation and/or growth, binding of said agent to said expression product will have the effect of negating said tumor promoting activity. In one such embodiment, said agent is an apoptosis-inducing agent that induces cell suicide, thereby killing the cancer cell and halting tumor growth.

[0150] Many cancers contain chromosomal rearrangements, which typically represent translocations, amplifications, or deletions of specific regions of genomic DNA. A recurrent chromosomal rearrangement that is associated with a specific stage and type of cancer always affects a gene (or possibly genes) that play a direct and critical role in the initiation or progression of the disease. Many of the known oncogenes or tumor suppressor genes that play direct roles in cancer have either been initially identified based upon their positional cloning from a recurrent chromosomal rearrangement or have been demonstrated to fall within a rearrangement subsequent to their cloning by other methods. In all cases, such genes display amplification at both the level of DNA copy number and at the level of transcriptional expression at the mRNA level.

[0151] The present method also relates to a method for determining functionally related genes comprising contacting one or more gene sequences corresponding to the cDNAs as identified in Table 1 with an agent that modulates expression of more than one gene in such group and thereby determining a subset of genes of said group.

[0152] In accordance with the present invention, said functionally related genes are genes modulating the same metabolic pathway or said genes are genes encoding functionally related polypeptides. In one such embodiment, said genes are genes whose expression is modulated by the same transcriptional activator or enhancer sequence, especially where said transcriptional activator or enhancer increases, or otherwise modulates, the activity of a gene corresponding to a cDNA as identified in Table 1.

[0153] The present invention also relates to a process that comprises a method for producing a product comprising identifying an agent according to one of the disclosed methods for identifying such an agent (i.e., the therapeutic agents identified according to the assay procedures disclosed herein) wherein said product is the data collected with respect to said agent as a result of said identification process, or assay, and wherein said data is sufficient to convey the chemical character and/or structure and/or properties of said agent. For example, the present invention specifically contemplates a situation whereby a user of an assay of the invention may use the assay to screen for compounds having the desired enzyme modulating activity and, having identified the compound, then conveys that information (i.e., information as to structure, dosage, etc) to another user who then utilizes the information to reproduce the agent and administer it for therapeutic or research purposes according to the invention. For example, the user of the assay (user 1) may screen a number of test compounds without knowing the structure or identity of the compounds (such as where a number of code numbers are used the first user is simply given samples labeled with said code numbers) and, after performing the screening process, using one or more assay processes of the present invention, then imparts to a second user (user 2), verbally or in writing or some equivalent fashion, sufficient. information to identify the compounds having a particular modulating activity (for example, the code number with the corresponding results). This transmission of information from user 1 to user 2 is specifically contemplated by the present invention.

[0154] In accordance with the foregoing, the present invention relates to a method for producing test data with respect to the anti-neoplastic activity of a compound comprising:

[0155] (a) contacting a compound with a cell that expresses at least one gene corresponding to a polynucleotide comprising a nucleotide sequence of serial number 1-229 (breast), 230-440 (colon), 441-656 (lung) and 657-805 (prostate) of Table 1 or encoding a polypeptide or transcript of SEQ ID NO:

[0156] 806-923 and under conditions promoting expression of said gene;

[0157] (b) detecting a change in expression of said gene compared to expression when said compound is not present; and

[0158] (c) producing test data with respect to the gene modulating activity of said compound based on a change in the expression of the determined gene, or genes, whose expression is otherwise elevated in a non-cancerous cell over that in a cancerous cell and a decrease in the expression of the determined gene, or genes whose expression is otherwise increased in a cancerous cell over that in a non-cancerous cell indicating anti-neoplastic activity.

[0159] In another embodiment, the present invention provides a method for monitoring the progress of a cancer treatment, such as where the methods of the invention permit a determination that a given course of cancer therapy is or is not proving effective because of an increased or decreased expression of a gene, or genes, disclosed herein. For example, where there is an increased copy number of one or more of the genes as identified in Table 1 (SEQ ID NO: 1-805), monitoring of such genes can predict success or failure of a course of therapy, such as chemotherapy, or predict the likelihood of a relapse based on elevated activity or expression of one or more of these genes following such course of therapy.

[0160] In accordance with the foregoing, the present invention contemplates a method for determining the progress of a treatment for cancer in a patient afflicted with cancer, following commencement of a cancer treatment on said patient, comprising:

[0161] (a) determining in said patient a change in expression of one or more genes corresponding to a polynucleotide comprising a nucleotide sequence of serial number 1-229 (breast), 230-440 (colon), 441-656 (lung) and 657-805 (prostate) of Table 1 or encoding a polypeptide or transcript of serial number 806-923 of table 1) which include any of SEQ ID NO: 1-923) and under conditions promoting expression of said one or more genes; and

[0162] (b) detecting a change in expression of said gene compared to expression of said one or more determined genes prior to commencement of said cancer treatment;

[0163] thereby determining the progress of said treatment.

[0164] In a preferred embodiment, the detected change in expression is a decrease in expression. In another preferred embodiment, the cancer treatment is treatment with a chemotherapeutic agent, especially an agent that modulates, preferably decreases, expression of a gene identified herein, such as where said agent was first identified as having anti-neoplastic activity using a method of the invention. Thus, in accordance with this aspect of the present invention, a patient, or even a research animal, such as a mouse, rat, rabbit or primate, afflicted with cancer, including a cancer induced for research purposes, is introduced to a cancer treatment regimen, such as administration of an anti-cancer agent, including one first identified as having anti-neoplastic activity by one or more of the screening methods disclosed herein. The progress and success or failure of such treatment is subsequently ascertained by determining the subsequent expression of one or more, preferably at least 3, or 5, or 10, of the genes identified herein, or that encodes a transcript or polypeptide disclosed herein (see Table 1) following said treatment. In a preferred embodiment, a treatment that reduces said expression is deemed advantageous and may then be the basis for continuing said treatment. The methods of the invention thereby provide a means of continually monitoring the success of the treatment and evaluating both the need, and desirability, of continuing said treatment. In addition, more than one said treatment may be administered simultaneously without diminishing the value of the methods of the invention in determining the overall success of such combined treatment. Thus, more than one said anti-neoplastic agent may be administered to the same patient and overall effectiveness ascertained by the recited methods.

[0165] In accordance with the foregoing, the present invention also contemplates a method for determining the likelihood of survival of a patient afflicted with cancer, following commencement of a cancer treatment on said patient, comprising:

[0166] (a) determining in said patient a change in expression of one or more genes corresponding to a polynucleotide comprising a nucleotide sequence of serial number 1-229 (breast), 230-440 (colon), 441-656 (lung) and 657-805 (prostate) of Table 1 or encoding a polypeptide or transcript of serial number 806-923 of Table 1 and under conditions promoting expression of said one or more genes; and

[0167] (b) detecting a change in expression of said gene compared to expression of said one or more determined genes prior to commencement of said cancer treatment;

[0168] thereby determining the likelihood of survival of said treatment.

[0169] In a preferred embodiment, the detected change in expression is a decrease in expression and said determined gene, or genes, may include 2, 3, 5, 10 or more of the genes described herein. Thus, the methods of the invention may be utilized as a means for compiling cancer survival statistics following one or more, possibly combined, treatments for cancer as in keeping with the other methods disclosed herein.

[0170] The genes identified herein also offer themselves as pharmacodynamic markers (or as pharmacogenetic and/or surrogate markers), such as for patient profiling prior to clinical trials and/or targeted therapies, including combination treatments, resulting from the identification of these genes as valid gene targets for chemotherapy based on the screening procedures of the invention. In one embodiment thereof, the likelihood of success of a cancer treatment with a selected chemotherapeutic agent may be based on the fact that such agent has been determined to have expression modulating activity with one or more genes identified herein, especially where said genes have been identified as showing elevated expression levels in samples from a prospective patient afflicted with cancer. Methods described elsewhere herein for determining cancerous status of a cell may find ready use in such evaluations.

[0171] It should be cautioned that, in carrying out the procedures of the present invention as disclosed herein, any reference to particular buffers, media, reagents, cells, culture conditions and the like are not intended to be limiting, but are to be read so as to include all related materials that one of ordinary skill in the art would recognize as being of interest or value in the particular context in which that discussion is presented. For example, it is often possible to substitute one buffer system or culture medium for another and still achieve similar, if not identical, results. Those of skill in the art will have sufficient knowledge of such systems and methodologies so as to be able, without undue experimentation, to make such substitutions as will optimally serve their purposes in using the methods and procedures disclosed herein.

[0172] The present invention will now be further described by way of the following non-limiting example. In applying the disclosure of the example, it should be kept clearly in mind that other and different embodiments of the methods disclosed according to the present invention will no doubt suggest themselves to those of skill in the relevant art.

### EXAMPLE

[0173] Cancerous cells that over-express one or more of the genes selected from those that correspond to genes as identified in Table 1 (serial number 1-229 (breast), 230-440 (colon), 441-656 (lung) and 657-805 (prostate); serial number 806-923 (transcript or protein), or SEQ ID NO: 1-805 and 855-923) are grown to a density of 10⁵ cells/cm2 in Leibovitz's L-15 medium supplemented with 2 mM L-glutamine (90%) and 10% fetal bovine serum. The cells are collected after treatment with 0.25% trypsin, 0.02% EDTA at 37° C. for 2 to 5 minutes. The trypsinized cells are then diluted with 30 ml growth medium and plated at a density of 50,000 cells per well in a 96 well plate (200 μl/well). The following day, cells are treated with either compound buffer alone, or compound buffer containing a chemical agent to be tested, for 24 hours. The media is then removed, the cells lysed and the RNA recovered using the RNAeasy reagents and protocol obtained from Qiagen. RNA is quantitated and 10 ng of sample in 1 μl are added to 24 μl of Taqman reaction mix containing 1X PCR buffer, RNAsin, reverse transcriptase, nucleoside triphosphates, amplitaq gold, tween 20, glycerol, bovine serum albumin (BSA) and specific PCR primers and probes for a reference gene (18S RNA) and a test gene (Gene X). Reverse transcription is then carried out at 48° C. for 30 minutes. The sample is then applied to a Perlin Elmer 7700 sequence detector and heat denatured for 10 minutes at 95° C. Amplification is performed through 40 cycles using 15 seconds annealing at 60° C. followed by a 60 second extension at 72° C. and 30 second denaturation at 95° C. Data files are then captured and the data analyzed with the appropriate baseline windows and thresholds.

[0174] The quantitative difference between the target and reference genes is then calculated and a relative expression value determined for all of the samples used. This procedure is then repeated for each of the target genes in a given signature, or characteristic, set and the relative expression ratios for each pair of genes is determined (i.e., a ratio of expression is determined for each target gene versus each of the other genes for which expression is measured, where each gene's absolute expression is determined relative to the reference gene for each compound, or chemical agent, to be screened). The samples are then scored and ranked according to the degree of alteration of the expression profile in the treated samples relative to the control. The overall expression of the set of genes relative to the controls, as modulated by one chemical agent relative to another, is also ascertained. Chemical agents having the most effect on a given gene, or set of genes, are considered the most anti-neoplastic.

TABLE 1

| Serial | | | | | | | | | Protein/ |
|---|---|---|---|---|---|---|---|---|---|
| No. | SEQ ID | accession | tissue | p_m | chr | band | unigene | Description | Transcript |
| 1 | 3 | AK000490 | breast | primary | 1 | p31.2 | Hs.133260 | hypothetical protein FLJ20354 | |
| 2 | 10 | R33352 | breast | primary | 1 | p31.3 | NULL | unknown | |
| 3 | 13 | AI739473 | breast | primary | 1 | p32.3 | Hs.75616 | 24-dehydrocholesterol reductase | |
| 4 | 5 | U63743 | breast | primary | 1 | p34.1 | Hs.69360 | kinesin-like 6 (mitotic centromere-associated | |
| | | | | | | | | kinesin) | |
| 5 | 2 | U05340 | breast | primary | 1 | p34.2 | Hs.82906 | CDC20 cell division cycle 20 homolog (S. cerevisiae) | |
| 6 | 11 | AA203213 | breast | primary | 1 | p36.33 | Hs.833 | interferon-stimulated protein 15 kDa | |
| 7 | 12 | T16144 | breast | primary | 1 | q21.3 | NULL | unknown | |
| 8 | 1 | AI053741 | breast | primary | 1 | q22 | Hs.133294 | ESTs | |
| 9 | 14 | AB037776 | breast | primary | 1 | q23.1 | Hs.38002 | immunoglobulin superfamily member 9 | |
| 10 | 9 | AA830844 | breast | primary | 1 | q23.2 | Hs.127310 | kinase interacting with leukemia-associated | |
| | | | | | | | | gene (stathmin) | |
| 11 | 7 | AF326731 | breast | primary | 1 | q23.3 | Hs.234545 | cell division cycle associated 1 | |
| 12 | 4 | AB032931 | breast | primary | 1 | q32.1 | Hs.5199 | HSPC150 protein similar to ubiquitin- | |
| | | | | | | | | conjugating enzyme | |
| 13 | 8 | AI380204 | breast | primary | 1 | q32.1 | Hs.118064 | similar to rat nuclear ubiquitous casein kinase 2 | |
| 14 | 6 | U30872 | breast | primary | 1 | q32.3 | Hs.77204 | centromere protein F 350/400 ka (mitosin) | |
| 15 | 55 | U14518 | breast | primary | 2 | p23.3 | Hs.1594 | centromere protein A 17 kDa | |
| 16 | 54 | AI492879 | breast | primary | 2 | p25.1 | Hs.75319 | ribonucleotide reductase M2 polypeptide | |
| 17 | 56 | AL045632 | breast | primary | 2 | q33.1 | Hs.44269 | hypothetical protein FLJ25211 | |
| 18 | 74 | M86699 | breast | primary | 3 | p21.31 | Hs.169840 | TTK protein kinase | |
| 19 | 77 | AI962335 | breast | primary | 3 | p24.3 | Hs.196042 | ESTs | |
| 20 | 75 | AI867102 | breast | primary | 3 | p25.1 | Hs.56966 | KIAA0906 protein | |
| 21 | 71 | AI751438 | breast | primary | 3 | q12.3 | Hs.41271 | Homo sapiens mRNA full length insert cDNA | |
| | | | | | | | | clone EUROIMAGE 1913076 | |
| 22 | 72 | X57527 | breast | primary | 3 | q12.3 | Hs.114599 | collagen type VIII alpha 1 | |
| 23 | 76 | W02608 | breast | primary | 3 | q26.1 | Hs.36830 | ESTs Moderately similar to zinc finger protein | |
| | | | | | | | | 91 (HPF7 HTF10) [Homo sapiens] [H. sapiens] | |
| 24 | 73 | AI823992 | breast | primary | 3 | q26.32 | Hs.122579 | epithelial cell transforming sequence 2 | |
| | | | | | | | | oncogene | |
| 25 | 78 | AI087975 | breast | primary | 3 | q28 | Hs.195225 | ESTs | |
| 26 | 82 | AW001872 | breast | primary | 5 | p13.1 | Hs.58435 | FYN binding protein (FYB-120/130) | |
| 27 | 80 | BE407516 | breast | primary | 5 | q13.2 | Hs.23960 | cyclin B1 | |
| 28 | 81 | U70370 | breast | primary | 5 | q31.1 | Hs.84136 | paired-like homeodomain transcription factor 1 | |
| 29 | 79 | AI739117 | breast | primary | 5 | q31.2 | Hs.73625 | RAB6 interacting kinesin-like (rabkinesin6) | |
| 30 | 83 | D14678 | breast | primary | 6 | p21.32 | Hs.20830 | kinesin-like 2 | |
| 31 | 85 | M13436 | breast | primary | 7 | p14.1 | Hs.727 | inhibin beta A (activin A activin AB alpha | |
| | | | | | | | | polypeptide) | |
| 32 | 86 | AI343467 | breast | primary | 7 | p14.1 | Hs.28792 | Homo sapiens cDNA FLJ11041 fis clone | |
| | | | | | | | | PLACE1004405 | |
| 33 | 84 | AK023208 | breast | primary | 7 | p14.2 | Hs.62180 | anillin actin binding protein (scraps homolog | |
| | | | | | | | | Drosophila) | |
| 34 | 89 | AI285531 | breast | primary | 7 | p15.2 | Hs.106260 | sorting nexin 10 | |
| 35 | 87 | AI922323 | breast | primary | 7 | p21.1 | Hs.91011 | anterior gradient 2 homolog (Xenepus laevis) | |
| 36 | 88 | U61145 | breast | primary | 7 | q36.1 | Hs.77256 | enhancer of zeste homolog 2 (Drosophila) | |
| 37 | 99 | AA625199 | breast | primary | 8 | NULL | Hs.352415 | solute carrier family 39 (zinc transporter) | |
| | | | | | | | | member 4 | |
| 38 | 100 | AI949095 | breast | primary | 8 | NULL | Hs.67776 | Homo sapiens clone IMAGE: 5455669 mRNA | |
| | | | | | | | | partial cds | |
| 39 | 90 | AI932328 | breast | primary | 8 | p21.1 | Hs.104741 | T-LAK cell-originated protein kinase | |
| 40 | 91 | AA203476 | breast | primary | 8 | q13.2 | Hs.252587 | pituitary tumor-transforming 1 | |
| 41 | 92 | AW043713 | breast | primary | 8 | q13.3 | Hs.70823 | sulfatase FP | |
| 42 | 96 | BE974098 | breast | primary | 8 | q21.13 | Hs.2384 | tumor protein D52 | |
| 43 | 98 | AF091433 | breast | primary | 8 | q22.1 | Hs.30464 | cyclin E2 | |
| 44 | 95 | AA046853 | breast | primary | 8 | q24.12 | Hs.76550 | mal T-cell differentiation protein 2 | |
| 45 | 93 | AI925583 | breast | primary | 8 | q24.13 | Hs.222088 | hypothetical protein MGC5254 | |
| 46 | 97 | AF098865 | breast | primary | 8 | q24.13 | Hs.71465 | squalene epoxidase | |
| 47 | 94 | AA147884 | breast | primary | 8 | q24.22 | Hs.9812 | Homo sapiens cDNA FLJ14388 fis clone | |
| | | | | | | | | HEMBA1002716 | |
| 48 | 103 | AW007586 | breast | primary | 9 | q34.11 | Hs.133122 | zinc finger DHHC domain containing 12 | |
| 49 | 101 | W25552 | breast | primary | 9 | q34.3 | Hs.212613 | hypothetical protein FLJ36779 | |
| 50 | 102 | AI811865 | breast | primary | 9 | q34.3 | Hs.274152 | EST | |
| 51 | 17 | AF067656 | breast | primary | 10 | q21.1 | Hs.42650 | ZW10 interactor | |
| 52 | 16 | AL524035 | breast | primary | 10 | q21.2 | Hs.334562 | cell division cycle 2 G1 to S and G2 to M | |
| 53 | 15 | AI674163 | breast | primary | 10 | q23.33 | Hs.14559 | hypothetical protein FLJ10540 | |
| 54 | 21 | AB018293 | breast | primary | 11 | p15.3 | Hs.314434 | KIAA0750 gene product | |
| 55 | 18 | AL079372 | breast | primary | 11 | q13.1 | Hs.23044 | similar to RIKEN cDNA 2610036L13 | |
| 56 | 22 | D60944 | breast | primary | 11 | q13.4 | Hs.84700 | serologically defined colon cancer antigen 28 | |
| 57 | 19 | X14850 | breast | primary | 11 | q23.3 | Hs.147097 | H2A histone family member X | |
| 58 | 20 | AA704137 | breast | primary | 11 | q23.3 | Hs.125359 | Thy-1 cell surface antigen | |
| 59 | 23 | U74612 | breast | primary | 12 | p13.33 | Hs.239 | forkhead box M1 | |
| 60 | 24 | U82984 | breast | primary | 12 | q13.12 | Hs.23900 | Rac GTPase activating protein 1 | |
| 61 | 25 | AI291142 | breast | primary | 13 | q33.3 | Hs.183874 | cullin 4A | |
| 62 | 26 | L25876 | breast | primary | 14 | q22.1 | Hs.84113 | cyclin-dependent kinase inhibitor 3 (CDK2- | |
| | | | | | | | | associated dual specificity phosphatase) | |
| 63 | 27 | AL080146 | breast | primary | 15 | q21.3 | Hs.194698 | cyclin B2 | |
| 64 | 28 | D14657 | breast | primary | 15 | q22.2 | Hs.81892 | KIAA0101 gene product | |
| 65 | 29 | AA195614 | breast | primary | 15 | q25.3 | Hs.344037 | protein regulator of cytokinesis 1 | |
| 66 | 31 | AW003626 | breast | primary | 16 | NULL | Hs.159154 | tubulin beta 4 | |
| 67 | 32 | BC003186 | breast | primary | 16 | NULL | Hs.108196 | HSPC037 protein | |
| 68 | 30 | AI819340 | breast | primary | 16 | p13.3 | Hs.13561 | hypothetical protein MGC4692 | |
| 69 | 34 | W92110 | breast | primary | 16 | p13.3 | Hs.279623 | selenoprotein × 1 | |
| 70 | 35 | AI953838 | breast | primary | 16 | p13.3 | Hs.124015 | hypothetical protein MGC2605 | |
| 71 | 36 | AL520675 | breast | primary | 16 | p13.3 | Hs.351474 | hypothetical protein FLJ30002 | |
| 72 | 37 | BE965311 | breast | primary | 16 | p13.3 | Hs.124915 | hypothetical protein MGC2601 | |
| 73 | 38 | AI701742 | breast | primary | 16 | p13.3 | Hs.290943 | Homo sapiens similar to possible G-protein | |
| | | | | | | | | receptor clone MGC: 21993 IMAGE: 4398317 | |
| | | | | | | | | mRNA complete cds | |
| 74 | 33 | AA904482 | breast | primary | 16 | q12.2 | Hs.368078 | ESTs | |
| 75 | 42 | AI683036 | breast | primary | 17 | NULL | Hs.314169 | KIAA1618 protein | |
| 76 | 44 | U81800 | breast | primary | 17 | NULL | Hs.85838 | solute carrier family 16 (monocarboxylic acid | |
| | | | | | | | | transporters) member 3 | |
| 77 | 45 | BE328850 | breast | primary | 17 | q11.2 | Hs.348504 | hypothetical protein BC014072 | |
| 78 | 39 | AW003286 | breast | primary | 17 | q21.31 | Hs.370428 | ESTs Moderately similar to TP2A_HUMAN | |
| | | | | | | | | DNA topoisomerase II alpha isozyme | |
| | | | | | | | | [H. sapiens] | |
| 79 | 41 | AL561834 | breast | primary | 17 | q21.31 | Hs.156346 | topoisomerase (DNA) II alpha 170 kDa | |
| 80 | 48 | L47276 | breast | primary | 17 | q21.31 | NULL | unknown | |
| 81 | 49 | BC001038 | breast | primary | 17 | q22 | Hs.307036 | Homo sapiens Similar to epsin 3 clone | |
| | | | | | | | | MGC: 1006 IMAGE: 3505495 mRNA complete | |
| | | | | | | | | cds | |
| 82 | 40 | AA424160 | breast | primary | 17 | q23.2 | Hs.165909 | ESTs Weakly similar to hypothetical protein | |
| | | | | | | | | FLJ20489 [Homo sapiens] [H. sapiens] | |
| 83 | 51 | BF029215 | breast | primary | 17 | q23.2 | Hs.103512 | Homo sapiens cDNA FLJ36569 fis clone | |
| | | | | | | | | TRACH2010824 highly similar to | |
| | | | | | | | | Ribonucleoprotein | |
| 84 | 43 | AI675178 | breast | primary | 17 | q24.2 | Hs.90207 | hypothetical protein MGC11138 | |
| 85 | 50 | U28386 | breast | primary | 17 | q24.3 | Hs.159557 | karyopherin alpha 2 (RAG cohort 1 importin | |
| | | | | | | | | alpha 1) | |
| 86 | 46 | AA635844 | breast | primary | 17 | q25.3 | Hs.109706 | hematological and neurological expressed 1 | |
| 87 | 47 | K02581 | breast | primary | 17 | q25.3 | Hs.105097 | thymidine kinase 1 soluble | |
| 88 | 52 | AF017790 | breast | primary | 18 | p11.32 | Hs.58169 | highly expressed in cancer rich in leucine | |
| | | | | | | | | heptad repeats | |
| 89 | 53 | AA719022 | breast | primary | 19 | q13.43 | Hs.288549 | ubiquitin UBF-fl | |
| 90 | 65 | D80008 | breast | primary | 20 | p11.21 | Hs.36232 | KIAA0186 gene product | |
| 91 | 63 | AI990405 | breast | primary | 20 | p11.23 | Hs.194691 | retinoic acid induced 3 | |
| 92 | 57 | AA534688 | breast | primary | 20 | q11.1 | Hs.9329 | chromosome 20 open reading frame 1 | |
| 93 | 66 | AW003586 | breast | primary | 20 | q11.22 | Hs.274411 | SCAN domain containing 1 | |
| 94 | 59 | U73379 | breast | primary | 20 | q13.12 | Hs.93002 | ubiquitin-conjugating enzyme E2C | |
| 95 | 62 | AI990026 | breast | primary | 20 | q13.12 | Hs.286 | ribosomal protein L4 | |
| 96 | 67 | AA207074 | breast | primary | 20 | q13.13 | Hs.56237 | breast carcinoma amplified sequence 4 | |
| 97 | 60 | AF041260 | breast | primary | 20 | q13.2 | Hs.129057 | breast carcinoma amplified sequence 1 | |
| 98 | 61 | AF011468 | breast | primary | 20 | q13.31 | Hs.250822 | serine/threonine kinase 6 | |
| 99 | 58 | AA535819 | breast | primary | 20 | q13.32 | Hs.83883 | transmembrane prostate androgen induced | |
| | | | | | | | | RNA | |
| 100 | 64 | X70940 | breast | primary | 20 | q13.33 | Hs.2642 | eukaryotic translation elongation factor 1 alpha 2 | |
| 101 | 69 | Y15915 | breast | primary | 22 | q13.1 | Hs.172928 | collagen type I alpha 1 | |
| 102 | 70 | AL035081 | breast | primary | 22 | q13.1 | Hs.250696 | KDEL (Lys-Asp-Glu-Leu) endoplasmic | |
| | | | | | | | | reticulum protein retention receptor 3 | |
| 103 | 68 | AI381686 | breast | primary | 22 | q13.2 | Hs.208912 | hypothetical protein MGC861 | |
| 104 | 106 | AK000490 | breast | metastatic | 1 | p31.2 | Hs.133260 | hypothetical protein FLJ20354 | |
| 105 | 113 | R33352 | breast | metastatic | 1 | p31.3 | NULL | unknown | |
| 106 | 116 | AI739473 | breast | metastatic | 1 | p32.3 | Hs.75616 | 24-dehydrocholesterol reductase | |
| 107 | 108 | U63743 | breast | metastatic | 1 | p34.1 | Hs.69360 | kinesin-like 6 (mitotic centromere-associated | |
| | | | | | | | | kinesin) | |
| 108 | 105 | U05340 | breast | metastatic | 1 | p34.2 | Hs.82906 | CDC20 cell division cycle 20 homolog (S. cerevisiae) | |
| 109 | 119 | AI992172 | breast | metastatic | 1 | p36.13 | Hs.83551 | microfibrillar-associated protein 2 | |
| 110 | 114 | AA203213 | breast | metastatic | 1 | p36.33 | Hs.833 | interferon-stimulated protein 15 kDa | |
| 111 | 115 | T16144 | breast | metastatic | 1 | q21.3 | NULL | unknown | |
| 112 | 104 | AI053741 | breast | metastatic | 1 | q22 | Hs.133294 | ESTs | |
| 113 | 118 | AB037776 | breast | metastatic | 1 | q23.1 | Hs.38002 | immunoglobulin superfamily member 9 | |
| 114 | 112 | AA830844 | breast | metastatic | 1 | q23.2 | Hs.127310 | kinase interacting with leukemia-associated | |
| | | | | | | | | gene (stathmin) | |
| 115 | 120 | R62346 | breast | metastatic | 1 | q23.2 | NULL | unknown | |
| 116 | 110 | AF326731 | breast | metastatic | 1 | q23.3 | Hs.234545 | cell division cycle associated 1 | |
| 117 | 117 | AI983896 | breast | metastatic | 1 | q23.3 | Hs.191187 | ESTs | |
| 118 | 121 | AI798144 | breast | metastatic | 1 | q25.2 | Hs.209609 | ESTs | |
| 119 | 107 | AI990409 | breast | metastatic | 1 | q32.1 | Hs.5199 | HSPC150 protein similar to ubiquitin- | |
| | | | | | | | | conjugating enzyme | |
| 120 | 111 | AI380204 | breast | metastatic | 1 | q32.1 | Hs.118064 | similar to rat nuclear ubiquitous casein kinase 2 | |
| 121 | 109 | U30872 | breast | metastatic | 1 | q32.3 | Hs.77204 | centromere protein F 350/400 ka (mitosin) | |
| 122 | 169 | U14518 | breast | metastatic | 2 | p23.3 | Hs.1594 | centromere protein A 17 kDa | |
| 123 | 168 | AI492879 | breast | metastatic | 2 | p25.1 | Hs.75319 | ribonucleotide reductase M2 polypeptide | |
| 124 | 170 | AL045632 | breast | metastatic | 2 | q33.1 | Hs.44269 | hypothetical protein FLJ25211 | |
| 125 | 171 | N21131 | breast | metastatic | 2 | q37.3 | Hs.42949 | hairy and enhancer of split 6 (Drosophila) | |
| 126 | 191 | M86699 | breast | metastatic | 3 | p21.31 | Hs.169840 | TTK protein kinase | |
| 127 | 197 | AA663786 | breast | metastatic | 3 | p21.31 | NULL | unknown | |
| 128 | 194 | AI962335 | breast | metastatic | 3 | p24.3 | Hs.196042 | ESTs | |
| 129 | 195 | AB020713 | breast | metastatic | 3 | p25.1 | Hs.56966 | KIAA0906 protein | |
| 130 | 188 | AI557210 | breast | metastatic | 3 | q12.3 | Hs.41271 | Homo sapiens mRNA full length insert cDNA | |
| | | | | | | | | clone EUROIMAGE 1913076 | |
| 131 | 189 | X57527 | breast | metastatic | 3 | q12.3 | Hs.114599 | collagen type VIII alpha 1 | |
| 132 | 192 | W02608 | breast | metastatic | 3 | q26.1 | Hs.36830 | ESTs Moderately similar to zinc finger protein | |
| | | | | | | | | 91 (HPF7 HTF10) [Homo sapiens] [H. sapiens] | |
| 133 | 193 | AI760298 | breast | metastatic | 3 | q26.31 | Hs.128773 | ESTs | |
| 134 | 190 | AI823992 | breast | metastatic | 3 | q26.32 | Hs.122579 | epithelial cell transforming sequence 2 | |
| | | | | | | | | oncogene | |
| 135 | 196 | AI087975 | breast | metastatic | 3 | q28 | Hs.195225 | ESTs | |
| 136 | 201 | AW001872 | breast | metastatic | 5 | p13.1 | Hs.58435 | FYN binding protein (FYB-120/130) | |
| 137 | 199 | N90191 | breast | metastatic | 5 | q13.2 | Hs.23960 | cyclin B1 | |
| 138 | 200 | U70370 | breast | metastatic | 5 | q31.1 | Hs.84136 | paired-like homeodomain transcription factor 1 | |
| 139 | 198 | AI739117 | breast | metastatic | 5 | q31.2 | Hs.73625 | RAB6 interacting kinesin-like (rabkinesin6) | |
| 140 | 202 | D14678 | breast | metastatic | 6 | p21.32 | Hs.20830 | kinesin-like 2 | |
| 141 | 204 | M13436 | breast | metastatic | 7 | p14.1 | Hs.727 | inhibin beta A (activin A activin AB alpha | |
| | | | | | | | | polypeptide) | |
| 142 | 205 | AA059458 | breast | metastatic | 7 | p14.1 | Hs.28792 | Homo sapiens cDNA FLJ11041 fis clone | |
| | | | | | | | | PLACE1004405 | |
| 143 | 203 | AK023208 | breast | metastatic | 7 | p14.2 | Hs.62180 | anillin actin binding protein (scraps homolog | |
| | | | | | | | | Drosophila) | |
| 144 | 211 | AI742239 | breast | metastatic | 7 | p15.1 | Hs.91109 | Homo sapiens Similar to RIKEN cDNA | |
| | | | | | | | | E130201N16 gene clone IMAGE: 3845782 | |
| | | | | | | | | mRNA | |
| 145 | 208 | AI285531 | breast | metastatic | 7 | p15.2 | Hs.106260 | sorting nexin 10 | |
| 146 | 206 | AI922323 | breast | metastatic | 7 | p21.1 | Hs.91011 | anterior gradient 2 homolog (Xenepus laevis) | |
| 147 | 209 | AI961907 | breast | metastatic | 7 | q21.3 | Hs.179573 | collagen type I alpha 2 | |
| 148 | 210 | L37127 | breast | metastatic | 7 | q22.1 | Hs.80475 | polymerase (RNA) II (DNA directed) | |
| | | | | | | | | polypeptide J 13.3 kDa | |
| 149 | 207 | U61145 | breast | metastatic | 7 | q36.1 | Hs.77256 | enhancer of zeste homolog 2 (Drosophila) | |
| 150 | 220 | AA625199 | breast | metastatic | 8 | NULL | Hs.352415 | solute carrier family 39 (zinc transporter) | |
| | | | | | | | | member 4 | |
| 151 | 223 | AI949095 | breast | metastatic | 8 | NULL | Hs.67776 | Homo sapiens clone IMAGE: 5455669 mRNA | |
| | | | | | | | | partial cds | |
| 152 | 224 | W22510 | breast | metastatic | 8 | NULL | Hs.346950 | cellular retinoic acid binding protein 1 | |
| 153 | 225 | AA292431 | breast | metastatic | 8 | NULL | Hs.92679 | kinesin family member C2-like | |
| 154 | 226 | AI917311 | breast | metastatic | 8 | NULL | Hs.149152 | rhophilin 1 | |
| 155 | 212 | AI932328 | breast | metastatic | 8 | p21.1 | Hs.104741 | T-LAK cell-originated protein kinase | |
| 156 | 213 | AA203476 | breast | metastatic | 8 | q13.2 | Hs.252587 | pituitary tumor-transforming 1 | |
| 157 | 215 | BE500977 | breast | metastatic | 8 | q13.3 | Hs.70823 | sulfatase FP | |
| 158 | 217 | BE974098 | breast | metastatic | 8 | q21.13 | Hs.2384 | tumor protein D52 | |
| 159 | 219 | AF091433 | breast | metastatic | 8 | q22.1 | Hs.30464 | cyclin E2 | |
| 160 | 222 | AA610522 | breast | metastatic | 8 | q24.11 | Hs.162697 | ESTs | |
| 161 | 216 | AA046853 | breast | metastatic | 8 | q24.12 | Hs.76550 | mal T-cell differentiation protein 2 | |
| 162 | 218 | AI656807 | breast | metastatic | 8 | q24.13 | Hs.222088 | hypothetical protein MGC5254 | |
| 163 | 221 | D78130 | breast | metastatic | 8 | q24.13 | Hs.71465 | squalene epoxidase | |
| 164 | 214 | AA147884 | breast | metastatic | 8 | q24.22 | Hs.9812 | Homo sapiens cDNA FLJ14388 fis clone | |
| | | | | | | | | HEMBA1002716 | |
| 165 | 229 | AW007586 | breast | metastatic | 9 | q34.11 | Hs.133122 | zinc finger DHHC domain containing 12 | |
| 166 | 227 | W25552 | breast | metastatic | 9 | q34.3 | Hs.212613 | hypothetical protein FLJ36779 | |
| 167 | 228 | AI811865 | breast | metastatic | 9 | q34.3 | Hs.274152 | EST | |
| 168 | 124 | AF067656 | breast | metastatic | 10 | q21.1 | Hs.42650 | ZW10 interactor | |
| 169 | 123 | D88357 | breast | metastatic | 10 | q21.2 | Hs.334562 | cell division cycle 2 G1 to S and G2 to M | |
| 170 | 122 | AI674163 | breast | metastatic | 10 | q23.33 | Hs.14559 | hypothetical protein FLJ10540 | |
| 171 | 125 | U37426 | breast | metastatic | 10 | q23.33 | Hs.8878 | kinesin-like 1 | |
| 172 | 131 | AA705015 | breast | metastatic | 11 | p15.1 | Hs.185918 | Homo sapiens cDNA FLJ32525 fis clone | |
| | | | | | | | | SMINT2000060 | |
| 173 | 129 | AB018293 | breast | metastatic | 11 | p15.3 | Hs.314434 | KIAA0750 gene product | |
| 174 | 126 | AL079372 | breast | metastatic | 11 | q13.1 | Hs.23044 | similar to RIKEN cDNA 2610036L13 | |
| 175 | 130 | AF151810 | breast | metastatic | 11 | q13.4 | Hs.84700 | serologically defined colon cancer antigen 28 | |
| 176 | 127 | X14850 | breast | metastatic | 11 | q23.3 | Hs.147097 | H2A histone family member X | |
| 177 | 128 | AA704137 | breast | metastatic | 11 | q23.3 | Hs.125359 | Thy-1 cell surface antigen | |
| 178 | 132 | U74612 | breast | metastatic | 12 | p13.33 | Hs.239 | forkhead box M1 | |
| 179 | 133 | U82984 | breast | metastatic | 12 | q13.12 | Hs.23900 | Rac GTPase activating protein 1 | |
| 180 | 134 | R61322 | breast | metastatic | 12 | q24.31 | Hs.204166 | Human clone 295 5cM region surrounding | |
| | | | | | | | | hepatocyte nuclear factor-1a/MODY3 mRNA | |
| 181 | 135 | AI291142 | breast | metastatic | 13 | q33.3 | Hs.183874 | cullin 4A | |
| 182 | 136 | L25876 | breast | metastatic | 14 | q22.1 | Hs.84113 | cyclin-dependent kinase inhibitor 3 (CDK2- | |
| | | | | | | | | associated dual specificity phosphatase) | |
| 183 | 137 | AL080146 | breast | metastatic | 15 | q21.3 | Hs.194698 | cyclin B2 | |
| 184 | 138 | D14657 | breast | metastatic | 15 | q22.2 | Hs.81892 | KIAA0101 gene product | |
| 185 | 139 | AA195614 | breast | metastatic | 15 | q25.3 | Hs.344037 | protein regulator of cytokinesis 1 | |
| 186 | 141 | AW003626 | breast | metastatic | 16 | NULL | Hs.159154 | tubulin beta 4 | |
| 187 | 142 | BC003186 | breast | metastatic | 16 | NULL | Hs.108196 | HSPC037 protein | |
| 188 | 149 | AI766311 | breast | metastatic | 16 | p12.3 | Hs.289047 | Homo sapiens cDNA FLJ14059 fis clone | |
| | | | | | | | | HEMBB1000573 | |
| 189 | 151 | AI344053 | breast | metastatic | 16 | p12.3 | Hs.115838 | ESTs Highly similar to hypothetical protein | |
| | | | | | | | | FLJ13593 [Homo sapiens] [H. sapiens] | |
| 190 | 140 | AI819340 | breast | metastatic | 16 | p13.3 | Hs.13561 | hypothetical protein MGC4692 | |
| 191 | 144 | W92110 | breast | metastatic | 16 | p13.3 | Hs.279623 | selenoprotein × 1 | |
| 192 | 145 | AI953838 | breast | metastatic | 16 | p13.3 | Hs.124015 | hypothetical protein MGC2605 | |
| 193 | 146 | AL520675 | breast | metastatic | 16 | p13.3 | Hs.351474 | hypothetical protein FLJ30002 | |
| 194 | 147 | BE965311 | breast | metastatic | 16 | p13.3 | Hs.124915 | hypothetical protein MGC2601 | |
| 195 | 148 | AI701742 | breast | metastatic | 16 | p13.3 | Hs.290943 | Homo sapiens similar to possible G-protein | |
| | | | | | | | | receptor clone MGC: 21993 IMAGE: 4398317 | |
| | | | | | | | | mRNA complete cds | |
| 196 | 150 | AI655799 | breast | metastatic | 16 | p13.3 | Hs.197114 | serine/arginine repetitive matrix 2 | |
| 197 | 143 | AA904482 | breast | metastatic | 16 | q12.2 | Hs.368078 | ESTs | |
| 198 | 154 | AI683036 | breast | metastatic | 17 | NULL | Hs.314169 | KIAA1618 protein | |
| 199 | 156 | U81800 | breast | metastatic | 17 | NULL | Hs.85838 | solute carrier family 16 (monocarboxylic acid | |
| | | | | | | | | transporters) member 3 | |
| 200 | 157 | BE328850 | breast | metastatic | 17 | q11.2 | Hs.348504 | hypothetical protein BC014072 | |
| 201 | 152 | AW003286 | breast | metastatic | 17 | q21.31 | Hs.370428 | ESTs Moderately similar to TP2A_HUMAN | |
| | | | | | | | | DNA topoisomerase II alpha isozyme | |
| | | | | | | | | [H. sapiens] | |
| 202 | 158 | AI375913 | breast | metastatic | 17 | q21.31 | Hs.156346 | topoisomerase (DNA) II alpha 170 kDa | |
| 203 | 161 | L47276 | breast | metastatic | 17 | q21.31 | NULL | unknown | |
| 204 | 162 | BC001038 | breast | metastatic | 17 | q22 | Hs.307036 | Homo sapiens Similar to epsin 3 clone | |
| | | | | | | | | MGC: 1006 IMAGE: 3505495 mRNA complete | |
| | | | | | | | | cds | |
| 205 | 153 | AA424160 | breast | metastatic | 17 | q23.2 | Hs.165909 | ESTs Weakly similar to hypothetical protein | |
| | | | | | | | | FLJ20489 [Homo sapiens] [H. sapiens] | |
| 206 | 164 | BF029215 | breast | metastatic | 17 | q23.2 | Hs.103512 | Homo sapiens cDNA FLJ36569 fis clone | |
| | | | | | | | | TRACH2010824 highly similar to | |
| | | | | | | | | Ribonucleoprotein | |
| 207 | 155 | AI675178 | breast | metastatic | 17 | q24.2 | Hs.90207 | hypothetical protein MGC11138 | |
| 208 | 163 | U28386 | breast | metastatic | 17 | q24.3 | Hs.159557 | karyopherin alpha 2 (RAG cohort 1 importin | |
| | | | | | | | | alpha 1) | |
| 209 | 165 | N42752 | breast | metastatic | 17 | q24.3 | Hs.42645 | ESTs | |
| 210 | 159 | K02581 | breast | metastatic | 17 | q25.3 | Hs.105097 | thymidine kinase 1 soluble | |
| 211 | 160 | AI525822 | breast | metastatic | 17 | q25.3 | Hs.109706 | hematological and neurological expressed 1 | |
| 212 | 166 | AF017790 | breast | metastatic | 18 | p11.32 | Hs.58169 | highly expressed in cancer rich in leucine | |
| | | | | | | | | heptad repeats | |
| 213 | 167 | AA719022 | breast | metastatic | 19 | q13.43 | Hs.288549 | ubiquitin UBF-fl | |
| 214 | 180 | D80008 | breast | metastatic | 20 | p11.21 | Hs.36232 | KIAA0186 gene product | |
| 215 | 178 | AI990405 | breast | metastatic | 20 | p11.23 | Hs.194691 | retinoic acid induced 3 | |
| 216 | 177 | AF098158 | breast | metastatic | 20 | q11.1 | Hs.9329 | chromosome 20 open reading frame 1 | |
| 217 | 181 | AW003586 | breast | metastatic | 20 | q11.22 | Hs.274411 | SCAN domain containing 1 | |
| 218 | 173 | U73379 | breast | metastatic | 20 | q13.12 | Hs.93002 | ubiquitin-conjugating enzyme E2C | |
| 219 | 176 | AI990026 | breast | metastatic | 20 | q13.12 | Hs.286 | ribosomal protein L4 | |
| 220 | 182 | AA207074 | breast | metastatic | 20 | q13.13 | Hs.56237 | breast carcinoma amplified sequence 4 | |
| 221 | 174 | AF041260 | breast | metastatic | 20 | q13.2 | Hs.129057 | breast carcinoma amplified sequence 1 | |
| 222 | 183 | AI638036 | breast | metastatic | 20 | q13.2 | Hs.189095 | sal-like 4 (Drosophila) | |
| 223 | 175 | AF011468 | breast | metastatic | 20 | q13.31 | Hs.250822 | serine/threonine kinase 6 | |
| 224 | 172 | AA535819 | breast | metastatic | 20 | q13.32 | Hs.83883 | transmembrane prostate androgen induced | |
| | | | | | | | | RNA | |
| 225 | 179 | X70940 | breast | metastatic | 20 | q13.33 | Hs.2642 | eukaryotic translation elongation factor 1 alpha 2 | |
| 226 | 184 | AI872267 | breast | metastatic | 20 | q13.33 | Hs.224895 | ESTs | |
| 227 | 186 | Y15915 | breast | metastatic | 22 | q13.1 | Hs.172928 | collagen type I alpha 1 | |
| 228 | 187 | AL035081 | breast | metastatic | 22 | q13.1 | Hs.250696 | KDEL (Lys-Asp-Glu-Leu) endoplasmic | |
| | | | | | | | | reticulum protein retention receptor 3 | |
| 229 | 185 | AI961206 | breast | metastatic | 22 | q13.2 | Hs.208912 | hypothetical protein MGC861 | |
| 230 | 241 | AK000490 | colon | primary | 1 | p31.2 | Hs.133260 | hypothetical protein FLJ20354 | |
| 231 | 235 | R33352 | colon | primary | 1 | p31.3 | NULL | unknown | |
| 232 | 233 | AI739473 | colon | primary | 1 | p32.3 | Hs.75616 | 24-dehydrocholesterol reductase | |
| 233 | 239 | U63743 | colon | primary | 1 | p34.1 | Hs.69360 | kinesin-like 6 (mitotic centromere-associated | |
| | | | | | | | | kinesin) | |
| 234 | 243 | U05340 | colon | primary | 1 | p34.2 | Hs.82906 | CDC20 cell division cycle 20 homolog (S. cerevisiae) | |
| 235 | 242 | AI990026 | colon | primary | 1 | p35.3 | Hs.286 | ribosomal protein L4 | |
| 236 | 234 | T16144 | colon | primary | 1 | q21.3 | NULL | unknown | |
| 237 | 232 | AW271106 | colon | primary | 1 | q22 | Hs.133294 | ESTs | |
| 238 | 230 | AB037776 | colon | primary | 1 | q23.1 | Hs.38002 | immunoglobulin superfamily member 9 | |
| 239 | 236 | AA830844 | colon | primary | 1 | q23.2 | Hs.127310 | kinase interacting with leukemia-associated | |
| | | | | | | | | gene (stathmin) | |
| 240 | 231 | AA383718 | colon | primary | 1 | q23.3 | Hs.234545 | cell division cycle associated 1 | |
| 241 | 237 | AI380204 | colon | primary | 1 | q32.1 | Hs.118064 | similar to rat nuclear ubiquitous casein kinase 2 | |
| 242 | 240 | AI990409 | colon | primary | 1 | q32.1 | Hs.5199 | HSPC150 protein similar to ubiquitin- | |
| | | | | | | | | conjugating enzyme | |
| 243 | 238 | U30872 | colon | primary | 1 | q32.3 | Hs.77204 | centromere protein F 350/400 ka (mitosin) | |
| 244 | 284 | U14518 | colon | primary | 2 | p23.3 | Hs.1594 | centromere protein A 17 kDa | |
| 245 | 285 | BE966236 | colon | primary | 2 | p25.1 | Hs.75319 | ribonucleotide reductase M2 polypeptide | |
| 246 | 283 | AL045632 | colon | primary | 2 | q33.1 | Hs.44269 | hypothetical protein FLJ25211 | |
| 247 | 302 | M86699 | colon | primary | 3 | p21.31 | Hs.169840 | TTK protein kinase | |
| 248 | 301 | AI962335 | colon | primary | 3 | p24.3 | Hs.196042 | ESTs | |
| 249 | 300 | AB020713 | colon | primary | 3 | p25.1 | Hs.56966 | KIAA0906 protein | |
| 250 | 304 | X57527 | colon | primary | 3 | q12.3 | Hs.114599 | collagen type VIII alpha 1 | |
| 251 | 305 | AI557210 | colon | primary | 3 | q12.3 | Hs.41271 | Homo sapiens mRNA full length insert cDNA | |
| | | | | | | | | clone EUROIMAGE 1913076 | |
| 252 | 303 | AI823992 | colon | primary | 3 | q26.32 | Hs.122579 | epithelial cell transforming sequence 2 | |
| | | | | | | | | oncogene | |
| 253 | 299 | AI087975 | colon | primary | 3 | q28 | Hs.195225 | ESTs | |
| 254 | 307 | AW001872 | colon | primary | 5 | p13.1 | Hs.58435 | FYN binding protein (FYB-120/130) | |
| 255 | 306 | M25753 | colon | primary | 5 | q13.2 | Hs.23960 | cyclin B1 | |
| 256 | 308 | U70370 | colon | primary | 5 | q31.1 | Hs.84136 | paired-like homeodomain transcription factor 1 | |
| 257 | 309 | AI739117 | colon | primary | 5 | q31.2 | Hs.73625 | RAB6 interacting kinesin-like (rabkinesin6) | |
| 258 | 310 | D14678 | colon | primary | 6 | p21.32 | Hs.20830 | kinesin-like 2 | |
| 259 | 313 | AA059458 | colon | primary | 7 | p14.1 | Hs.28792 | Homo sapiens cDNA FLJ11041 fis clone | |
| | | | | | | | | PLACE1004405 | |
| 260 | 315 | M13436 | colon | primary | 7 | p14.1 | Hs.727 | inhibin beta A (activin A activin AB alpha | |
| | | | | | | | | polypeptide) | |
| 261 | 314 | AI341261 | colon | primary | 7 | p14.2 | Hs.62180 | anillin actin binding protein (scraps homolog | |
| | | | | | | | | Drosophila) | |
| 262 | 312 | AI922323 | colon | primary | 7 | p21.1 | Hs.91011 | anterior gradient 2 homolog (Xenepus laevis) | |
| 263 | 311 | U61145 | colon | primary | 7 | q36.1 | Hs.77256 | enhancer of zeste homolog 2 (Drosophila) | |
| 264 | 316 | AI949095 | colon | primary | 8 | NULL | Hs.67776 | Homo sapiens clone IMAGE: 5455669 mRNA | |
| | | | | | | | | partial cds | |
| 265 | 318 | AA625199 | colon | primary | 8 | NULL | Hs.352415 | solute carrier family 39 (zinc transporter) | |
| | | | | | | | | member 4 | |
| 266 | 325 | AI932328 | colon | primary | 8 | p21.1 | Hs.104741 | T-LAK cell-originated protein kinase | |
| 267 | 324 | AA203476 | colon | primary | 8 | q13.2 | Hs.252587 | pituitary tumor-transforming 1 | |
| 268 | 323 | AW043713 | colon | primary | 8 | q13.3 | Hs.70823 | sulfatase FP | |
| 269 | 319 | AF091433 | colon | primary | 8 | q22.1 | Hs.30464 | cyclin E2 | |
| 270 | 321 | AL117612 | colon | primary | 8 | q24.12 | Hs.76550 | mal T-cell differentiation protein 2 | |
| 271 | 317 | D78130 | colon | primary | 8 | q24.13 | Hs.71465 | squalene epoxidase | |
| 272 | 320 | AI656807 | colon | primary | 8 | q24.13 | Hs.222088 | hypothetical protein MGC5254 | |
| 273 | 322 | AA147884 | colon | primary | 8 | q24.22 | Hs.9812 | Homo sapiens cDNA FLJ14388 fis clone | |
| | | | | | | | | HEMBA1002716 | |
| 274 | 326 | AW007586 | colon | primary | 9 | q34.11 | Hs.133122 | zinc finger DHHC domain containing 12 | |
| 275 | 327 | AI811865 | colon | primary | 9 | q34.3 | Hs.274152 | EST | |
| 276 | 328 | W25552 | colon | primary | 9 | q34.3 | Hs.212613 | hypothetical protein FLJ36779 | |
| 277 | 244 | AF067656 | colon | primary | 10 | q21.1 | Hs.42650 | ZW10 interactor | |
| 278 | 245 | AL524035 | colon | primary | 10 | q21.2 | Hs.334562 | cell division cycle 2 G1 to S and G2 to M | |
| 279 | 246 | AI674163 | colon | primary | 10 | q23.33 | Hs.14559 | hypothetical protein FLJ10540 | |
| 280 | 248 | AB018293 | colon | primary | 11 | p15.3 | Hs.314434 | KIAA0750 gene product | |
| 281 | 251 | AL079372 | colon | primary | 11 | q13.1 | Hs.23044 | similar to RIKEN cDNA 2610036L13 | |
| 282 | 247 | D60944 | colon | primary | 11 | q13.4 | Hs.84700 | serologically defined colon cancer antigen 28 | |
| 283 | 249 | AA704137 | colon | primary | 11 | q23.3 | Hs.125359 | Thy-1 cell surface antigen | |
| 284 | 250 | X14850 | colon | primary | 11 | q23.3 | Hs.147097 | H2A histone family member X | |
| 285 | 253 | U74612 | colon | primary | 12 | p13.33 | Hs.239 | forkhead box M1 | |
| 286 | 252 | U82984 | colon | primary | 12 | q13.12 | Hs.23900 | Rac GTPase activating protein 1 | |
| 287 | 254 | AI291142 | colon | primary | 13 | q33.3 | Hs.183874 | cullin 4A | |
| 288 | 255 | L25876 | colon | primary | 14 | q22.1 | Hs.84113 | cyclin-dependent kinase inhibitor 3 (CDK2- | |
| | | | | | | | | associated dual specificity phosphatase) | |
| 289 | 258 | AL080146 | colon | primary | 15 | q21.3 | Hs.194698 | cyclin B2 | |
| 290 | 257 | D14657 | colon | primary | 15 | q22.2 | Hs.81892 | KIAA0101 gene product | |
| 291 | 256 | AA195614 | colon | primary | 15 | q25.3 | Hs.344037 | protein regulator of cytokinesis 1 | |
| 292 | 265 | BC003186 | colon | primary | 16 | NULL | Hs.108196 | HSPC037 protein | |
| 293 | 266 | AW003626 | colon | primary | 16 | NULL | Hs.159154 | tubulin beta 4 | |
| 294 | 259 | AI701742 | colon | primary | 16 | p13.3 | Hs.290943 | Homo sapiens similar to possible G-protein | |
| | | | | | | | | receptor clone MGC: 21993 IMAGE: 4398317 | |
| | | | | | | | | mRNA complete cds | |
| 295 | 260 | BE965311 | colon | primary | 16 | p13.3 | Hs.124915 | hypothetical protein MGC2601 | |
| 296 | 261 | AL520675 | colon | primary | 16 | p13.3 | Hs.351474 | hypothetical protein FLJ30002 | |
| 297 | 262 | AI953838 | colon | primary | 16 | p13.3 | Hs.124015 | hypothetical protein MGC2605 | |
| 298 | 263 | W92110 | colon | primary | 16 | p13.3 | Hs.279623 | selenoprotein × 1 | |
| 299 | 267 | AI819340 | colon | primary | 16 | p13.3 | Hs.13561 | hypothetical protein MGC4692 | |
| 300 | 264 | AA904482 | colon | primary | 16 | q12.2 | Hs.368078 | ESTs | |
| 301 | 276 | U81800 | colon | primary | 17 | NULL | Hs.85838 | solute carrier family 16 (monocarboxylic acid | |
| | | | | | | | | transporters) member 3 | |
| 302 | 278 | AI683036 | colon | primary | 17 | NULL | Hs.314169 | KIAA1618 protein | |
| 303 | 275 | BE328850 | colon | primary | 17 | q11.2 | Hs.348504 | hypothetical protein BC014072 | |
| 304 | 272 | L47276 | colon | primary | 17 | q21.31 | NULL | unknown | |
| 305 | 274 | AI375913 | colon | primary | 17 | q21.31 | Hs.156346 | topoisomerase (DNA) II alpha 170 kDa | |
| 306 | 280 | AW003286 | colon | primary | 17 | q21.31 | Hs.370428 | ESTs Moderately similar to TP2A_HUMAN | |
| | | | | | | | | DNA topoisomerase II alpha isozyme | |
| | | | | | | | | [H. sapiens] | |
| 307 | 271 | BC001038 | colon | primary | 17 | q22 | Hs.307036 | Homo sapiens Similar to epsin 3 clone | |
| | | | | | | | | MGC: 1006 IMAGE: 3505495 mRNA complete | |
| | | | | | | | | cds | |
| 308 | 269 | BF029215 | colon | primary | 17 | q23.2 | Hs.103512 | Homo sapiens cDNA FLJ36569 fis clone | |
| | | | | | | | | TRACH2010824 highly similar to | |
| | | | | | | | | Ribonucleoprotein | |
| 309 | 279 | BG165011 | colon | primary | 17 | q23.2 | Hs.165909 | ESTs Weakly similar to hypothetical protein | |
| | | | | | | | | FLJ20489 [Homo sapiens] [H. sapiens] | |
| 310 | 277 | AI675178 | colon | primary | 17 | q24.2 | Hs.90207 | hypothetical protein MGC11138 | |
| 311 | 270 | U28386 | colon | primary | 17 | q24.3 | Hs.159557 | karyopherin alpha 2 (RAG cohort 1 importin | |
| | | | | | | | | alpha 1) | |
| 312 | 268 | AI525822 | colon | primary | 17 | q25.3 | Hs.109706 | hematological and neurological expressed 1 | |
| 313 | 273 | K02581 | colon | primary | 17 | q25.3 | Hs.105097 | thymidine kinase 1 soluble | |
| 314 | 281 | AF017790 | colon | primary | 18 | p11.32 | Hs.58169 | highly expressed in cancer rich in leucine | |
| | | | | | | | | heptad repeats | |
| 315 | 282 | AA719022 | colon | primary | 19 | q13.43 | Hs.288549 | ubiquitin UBF-fl | |
| 316 | 288 | D80008 | colon | primary | 20 | p11.21 | Hs.36232 | KIAA0186 gene product | |
| 317 | 290 | AI990405 | colon | primary | 20 | p11.23 | Hs.194691 | retinoic acid induced 3 | |
| 318 | 291 | AF098158 | colon | primary | 20 | q11.1 | Hs.9329 | chromosome 20 open reading frame 1 | |
| 319 | 287 | AW003586 | colon | primary | 20 | q11.22 | Hs.274411 | SCAN domain containing 1 | |
| 320 | 294 | U73379 | colon | primary | 20 | q13.12 | Hs.93002 | ubiquitin-conjugating enzyme E2C | |
| 321 | 286 | AA207074 | colon | primary | 20 | q13.13 | Hs.56237 | breast carcinoma amplified sequence 4 | |
| 322 | 293 | AF041260 | colon | primary | 20 | q13.2 | Hs.129057 | breast carcinoma amplified sequence 1 | |
| 323 | 292 | AF011468 | colon | primary | 20 | q13.31 | Hs.250822 | serine/threonine kinase 6 | |
| 324 | 295 | AA535819 | colon | primary | 20 | q13.32 | Hs.83883 | transmembrane prostate androgen induced | |
| | | | | | | | | RNA | |
| 325 | 289 | X70940 | colon | primary | 20 | q13.33 | Hs.2642 | eukaryotic translation elongation factor 1 alpha 2 | |
| 326 | 296 | AL035081 | colon | primary | 22 | q13.1 | Hs.250696 | KDEL (Lys-Asp-Glu-Leu) endoplasmic | |
| | | | | | | | | reticulum protein retention receptor 3 | |
| 327 | 297 | Y15916 | colon | primary | 22 | q13.1 | Hs.172928 | collagen type I alpha 1 | |
| 328 | 298 | AI381686 | colon | primary | 22 | q13.2 | Hs.208912 | hypothetical protein MGC861 | |
| 329 | 420 | AK000490 | colon | metastatic | 1 | p31.2 | Hs.133260 | hypothetical protein FLJ20354 | |
| 330 | 354 | R33352 | colon | metastatic | 1 | p31.3 | NULL | unknown | |
| 331 | 351 | AI739473 | colon | metastatic | 1 | p32.3 | Hs.75616 | 24-dehydrocholesterol reductase | |
| 332 | 396 | U63743 | colon | metastatic | 1 | p34.1 | Hs.69360 | kinesin-like 6 (mitotic centromere-associated | |
| | | | | | | | | kinesin) | |
| 333 | 425 | U05340 | colon | metastatic | 1 | p34.2 | Hs.82906 | CDC20 cell division cycle 20 homolog (S. cerevisiae) | |
| 334 | 421 | AI990026 | colon | metastatic | 1 | p35.3 | Hs.286 | ribosomal protein L4 | |
| 335 | 352 | T16144 | colon | metastatic | 1 | q21.3 | NULL | unknown | |
| 336 | 346 | AW271106 | colon | metastatic | 1 | q22 | Hs.133294 | ESTs | |
| 337 | 340 | AB037776 | colon | metastatic | 1 | q23.1 | Hs.38002 | immunoglobulin superfamily member 9 | |
| 338 | 357 | AA830844 | colon | metastatic | 1 | q23.2 | Hs.127310 | kinase interacting with leukemia-associated | |
| | | | | | | | | gene (stathmin) | |
| 339 | 330 | AF326731 | colon | metastatic | 1 | q23.3 | Hs.234545 | cell division cycle associated 1 | |
| 340 | 341 | AI983896 | colon | metastatic | 1 | q23.3 | Hs.191187 | ESTs | |
| 341 | 380 | AF326731 | colon | metastatic | 1 | q23.3 | Hs.234545 | cell division cycle associated 1 | |
| 342 | 360 | AI380204 | colon | metastatic | 1 | q32.1 | Hs.118064 | similar to rat nuclear ubiquitous casein kinase 2 | |
| 343 | 403 | AI990409 | colon | metastatic | 1 | q32.1 | Hs.5199 | HSPC150 protein similar to ubiquitin- | |
| | | | | | | | | conjugating enzyme | |
| 344 | 382 | U30872 | colon | metastatic | 1 | q32.3 | Hs.77204 | centromere protein F 350/400 ka (mitosin) | |
| 345 | 400 | U14518 | colon | metastatic | 2 | p23.3 | Hs.1594 | centromere protein A 17 kDa | |
| 346 | 419 | BE966236 | colon | metastatic | 2 | p25.1 | Hs.75319 | ribonucleotide reductase M2 polypeptide | |
| 347 | 349 | AL045632 | colon | metastatic | 2 | q33.1 | Hs.44269 | hypothetical protein FLJ25211 | |
| 348 | 365 | M86699 | colon | metastatic | 3 | p21.31 | Hs.169840 | TTK protein kinase | |
| 349 | 334 | AI962335 | colon | metastatic | 3 | p24.3 | Hs.196042 | ESTs | |
| 350 | 333 | AB020713 | colon | metastatic | 3 | p25.1 | Hs.56966 | KIAA0906 protein | |
| 351 | 412 | X57527 | colon | metastatic | 3 | q12.3 | Hs.114599 | collagen type VIII alpha 1 | |
| 352 | 417 | AI557210 | colon | metastatic | 3 | q12.3 | Hs.41271 | Homo sapiens mRNA full length insert cDNA | |
| | | | | | | | | clone EUROIMAGE 1913076 | |
| 353 | 344 | W02608 | colon | metastatic | 3 | q26.1 | Hs.36830 | ESTs Moderately similar to zinc finger protein | |
| | | | | | | | | 91 (HPF7 HTF10) [Homo sapiens] [H. sapiens] | |
| 354 | 395 | AI823992 | colon | metastatic | 3 | q26.32 | Hs.122579 | epithelial cell transforming sequence 2 | |
| | | | | | | | | oncogene | |
| 355 | 332 | AI087975 | colon | metastatic | 3 | q28 | Hs.195225 | ESTs | |
| 356 | 409 | AW001872 | colon | metastatic | 5 | p13.1 | Hs.58435 | FYN binding protein (FYB-120/130) | |
| 357 | 408 | M25753 | colon | metastatic | 5 | q13.2 | Hs.23960 | cyclin B1 | |
| 358 | 410 | U70370 | colon | metastatic | 5 | q31.1 | Hs.84136 | paired-like homeodomain transcription factor 1 | |
| 359 | 434 | AI739117 | colon | metastatic | 5 | q31.2 | Hs.73625 | RAB6 interacting kinesin-like (rabkinesin6) | |
| 360 | 389 | D14678 | colon | metastatic | 6 | p21.32 | Hs.20830 | kinesin-like 2 | |
| 361 | 427 | AA059458 | colon | metastatic | 7 | p14.1 | Hs.28792 | Homo sapiens cDNA FLJ11041 fis clone | |
| | | | | | | | | PLACE1004405 | |
| 362 | 436 | AI343467 | colon | metastatic | 7 | p14.1 | Hs.28792 | Homo sapiens cDNA FLJ11041 fis clone | |
| | | | | | | | | PLACE1004405 | |
| 363 | 437 | M13436 | colon | metastatic | 7 | p14.1 | Hs.727 | inhibin beta A (activin A activin AB alpha | |
| | | | | | | | | polypeptide) | |
| 364 | 329 | AK023208 | colon | metastatic | 7 | p14.2 | Hs.62180 | anillin actin binding protein (scraps homolog | |
| | | | | | | | | Drosophila) | |
| 365 | 438 | AK023208 | colon | metastatic | 7 | p14.2 | Hs.62180 | anillin actin binding protein (scraps homolog | |
| | | | | | | | | Drosophila) | |
| 366 | 440 | AK023208 | colon | metastatic | 7 | p14.2 | Hs.62180 | anillin actin binding protein (scraps homolog | |
| | | | | | | | | Drosophila) | |
| 367 | 348 | AI285531 | colon | metastatic | 7 | p15.2 | Hs.106260 | sorting nexin 10 | |
| 368 | 392 | AI922323 | colon | metastatic | 7 | p21.1 | Hs.91011 | anterior gradient 2 homolog (Xenepus laevis) | |
| 369 | 339 | AI961907 | colon | metastatic | 7 | q21.3 | Hs.179573 | collagen type I alpha 2 | |
| 370 | 356 | U61145 | colon | metastatic | 7 | q36.1 | Hs.77256 | enhancer of zeste homolog 2 (Drosophila) | |
| 371 | 336 | AI949095 | colon | metastatic | 8 | NULL | Hs.67776 | Homo sapiens clone IMAGE: 5455669 mRNA | |
| | | | | | | | | partial cds | |
| 372 | 362 | AA625199 | colon | metastatic | 8 | NULL | Hs.352415 | solute carrier family 39 (zinc transporter) | |
| | | | | | | | | member 4 | |
| 373 | 439 | AI932328 | colon | metastatic | 8 | p21.1 | Hs.104741 | T-LAK cell-originated protein kinase | |
| 374 | 428 | AA203476 | colon | metastatic | 8 | q13.2 | Hs.252587 | pituitary tumor-transforming 1 | |
| 375 | 414 | AW043713 | colon | metastatic | 8 | q13.3 | Hs.70823 | sulfatase FP | |
| 376 | 345 | AA524023 | colon | metastatic | 8 | q21.13 | Hs.2384 | tumor protein D52 | |
| 377 | 363 | AF091433 | colon | metastatic | 8 | q22.1 | Hs.30464 | cyclin E2 | |
| 378 | 342 | AA610522 | colon | metastatic | 8 | q24.11 | Hs.162697 | ESTs | |
| 379 | 373 | AL117612 | colon | metastatic | 8 | q24.12 | Hs.76550 | mal T-cell differentiation protein 2 | |
| 380 | 347 | D78130 | colon | metastatic | 8 | q24.13 | Hs.71465 | squalene epoxidase | |
| 381 | 366 | AI656807 | colon | metastatic | 8 | q24.13 | Hs.222088 | hypothetical protein MGC5254 | |
| 382 | 388 | AA147884 | colon | metastatic | 8 | q24.22 | Hs.9812 | Homo sapiens cDNA FLJ14388 fis clone | |
| | | | | | | | | HEMBA1002716 | |
| 383 | 374 | AW007586 | colon | metastatic | 9 | q34.11 | Hs.133122 | zinc finger DHHC domain containing 12 | |
| 384 | 383 | AI811865 | colon | metastatic | 9 | q34.3 | Hs.274152 | EST | |
| 385 | 393 | W25552 | colon | metastatic | 9 | q34.3 | Hs.212613 | hypothetical protein FLJ36779 | |
| 386 | 355 | AF067656 | colon | metastatic | 10 | q21.1 | Hs.42650 | ZW10 interactor | |
| 387 | 368 | X05360 | colon | metastatic | 10 | q21.2 | Hs.334562 | cell division cycle 2 G1 to S and G2 to M | |
| 388 | 416 | AI674163 | colon | metastatic | 10 | q23.33 | Hs.14559 | hypothetical protein FLJ10540 | |
| 389 | 337 | AA705015 | colon | metastatic | 11 | p15.1 | Hs.185918 | Homo sapiens cDNA FLJ32525 fis clone | |
| | | | | | | | | SMINT2000060 | |
| 390 | 372 | AB018293 | colon | metastatic | 11 | p15.3 | Hs.314434 | KIAA0750 gene product | |
| 391 | 401 | AL079372 | colon | metastatic | 11 | q13.1 | Hs.23044 | similar to RIKEN cDNA 2610036L13 | |
| 392 | 350 | D60944 | colon | metastatic | 11 | q13.4 | Hs.84700 | serologically defined colon cancer antigen 28 | |
| 393 | 379 | AA704137 | colon | metastatic | 11 | q23.3 | Hs.125359 | Thy-1 cell surface antigen | |
| 394 | 381 | X14850 | colon | metastatic | 11 | q23.3 | Hs.147097 | H2A histone family member X | |
| 395 | 429 | U74612 | colon | metastatic | 12 | p13.33 | Hs.239 | forkhead box M1 | |
| 396 | 384 | U82984 | colon | metastatic | 12 | q13.12 | Hs.23900 | Rac GTPase activating protein 1 | |
| 397 | 343 | R61322 | colon | metastatic | 12 | q24.31 | Hs.204166 | Human clone 295 5cM region surrounding | |
| | | | | | | | | hepatocyte nuclear factor-1a/MODY3 mRNA | |
| 398 | 353 | AI291142 | colon | metastatic | 13 | q33.3 | Hs.183874 | cullin 4A | |
| 399 | 387 | L25876 | colon | metastatic | 14 | q22.1 | Hs.84113 | cyclin-dependent kinase inhibitor 3 (CDK2- | |
| | | | | | | | | associated dual specificity phosphatase) | |
| 400 | 423 | AL080146 | colon | metastatic | 15 | q21.3 | Hs.194698 | cyclin B2 | |
| 401 | 413 | D14657 | colon | metastatic | 15 | q22.2 | Hs.81892 | KIAA0101 gene product | |
| 402 | 406 | AA195614 | colon | metastatic | 15 | q25.3 | Hs.344037 | protein regulator of cytokinesis 1 | |
| 403 | 407 | BC003186 | colon | metastatic | 16 | NULL | Hs.108196 | HSPC037 protein | |
| 404 | 415 | AW003626 | colon | metastatic | 16 | NULL | Hs.159154 | tubulin beta 4 | |
| 405 | 358 | AI701742 | colon | metastatic | 16 | p13.3 | Hs.290943 | Homo sapiens similar to possible G-protein | |
| | | | | | | | | receptor clone MGC: 21993 IMAGE: 4398317 | |
| | | | | | | | | mRNA complete cds | |
| 406 | 361 | BE965311 | colon | metastatic | 16 | p13.3 | Hs.124915 | hypothetical protein MGC2601 | |
| 407 | 364 | AL520675 | colon | metastatic | 16 | p13.3 | Hs.351474 | hypothetical protein FLJ30002 | |
| 408 | 377 | AI953838 | colon | metastatic | 16 | p13.3 | Hs.124015 | hypothetical protein MGC2605 | |
| 409 | 385 | W92110 | colon | metastatic | 16 | p13.3 | Hs.279623 | selenoprotein × 1 | |
| 410 | 431 | AI819340 | colon | metastatic | 16 | p13.3 | Hs.13561 | hypothetical protein MGC4692 | |
| 411 | 405 | AA904482 | colon | metastatic | 16 | q12.2 | Hs.368078 | ESTs | |
| 412 | 391 | U81800 | colon | metastatic | 17 | NULL | Hs.85838 | solute carrier family 16 (monocarboxylic acid | |
| | | | | | | | | transporters) member 3 | |
| 413 | 411 | AI683036 | colon | metastatic | 17 | NULL | Hs.314169 | KIAA1618 protein | |
| 414 | 390 | BE328850 | colon | metastatic | 17 | q11.2 | Hs.348504 | hypothetical protein BC014072 | |
| 415 | 376 | L47276 | colon | metastatic | 17 | q21.31 | NULL | unknown | |
| 416 | 386 | AI375913 | colon | metastatic | 17 | q21.31 | Hs.156346 | topoisomerase (DNA) II alpha 170 kDa | |
| 417 | 432 | AW003286 | colon | metastatic | 17 | q21.31 | Hs.370428 | ESTs Moderately similar to TP2A_HUMAN | |
| | | | | | | | | DNA topoisomerase II alpha isozyme | |
| | | | | | | | | [H. sapiens] | |
| 418 | 375 | BC001038 | colon | metastatic | 17 | q22 | Hs.307036 | Homo sapiens Similar to epsin 3 clone | |
| | | | | | | | | MGC: 1006 IMAGE: 3505495 mRNA complete | |
| | | | | | | | | cds | |
| 419 | 359 | BF029215 | colon | metastatic | 17 | q23.2 | Hs.103512 | Homo sapiens cDNA FLJ36569 fis clone | |
| | | | | | | | | TRACH2010824 highly similar to | |
| | | | | | | | | Ribonucleoprotein | |
| 420 | 426 | BG165011 | colon | metastatic | 17 | q23.2 | Hs.165909 | ESTs Weakly similar to hypothetical protein | |
| | | | | | | | | FLJ20489 [Homo sapiens] [H. sapiens] | |
| 421 | 398 | AI675178 | colon | metastatic | 17 | q24.2 | Hs.90207 | hypothetical protein MGC11138 | |
| 422 | 369 | U28386 | colon | metastatic | 17 | q24.3 | Hs.159557 | karyopherin alpha 2 (RAG cohort 1 importin | |
| | | | | | | | | alpha 1) | |
| 423 | 335 | AI525822 | colon | metastatic | 17 | q25.3 | Hs.109706 | hematological and neurological expressed 1 | |
| 424 | 378 | K02581 | colon | metastatic | 17 | q25.3 | Hs.105097 | thymidine kinase 1 soluble | |
| 425 | 331 | AF017790 | colon | metastatic | 18 | p11.32 | Hs.58169 | highly expressed in cancer rich in leucine | |
| | | | | | | | | heptad repeats | |
| 426 | 404 | AF017790 | colon | metastatic | 18 | p11.32 | Hs.58169 | highly expressed in cancer rich in leucine | |
| | | | | | | | | heptad repeats | |
| 427 | 422 | AA719022 | colon | metastatic | 19 | q13.43 | Hs.288549 | ubiquitin UBF-fl | |
| 428 | 371 | D80008 | colon | metastatic | 20 | p11.21 | Hs.36232 | KIAA0186 gene product | |
| 429 | 399 | AI990405 | colon | metastatic | 20 | p11.23 | Hs.194691 | retinoic acid induced 3 | |
| 430 | 402 | AF098158 | colon | metastatic | 20 | q11.1 | Hs.9329 | chromosome 20 open reading frame 1 | |
| 431 | 370 | AW003586 | colon | metastatic | 20 | q11.22 | Hs.274411 | SCAN domain containing 1 | |
| 432 | 433 | U73379 | colon | metastatic | 20 | q13.12 | Hs.93002 | ubiquitin-conjugating enzyme E2C | |
| 433 | 338 | AA207074 | colon | metastatic | 20 | q13.13 | Hs.56237 | breast carcinoma amplified sequence 4 | |
| 434 | 430 | AF041260 | colon | metastatic | 20 | q13.2 | Hs.129057 | breast carcinoma amplified sequence 1 | |
| 435 | 424 | AF011468 | colon | metastatic | 20 | q13.31 | Hs.250822 | serine/threonine kinase 6 | |
| 436 | 435 | AA535819 | colon | metastatic | 20 | q13.32 | Hs.83883 | transmembrane prostate androgen induced | |
| | | | | | | | | RNA | |
| 437 | 394 | X70940 | colon | metastatic | 20 | q13.33 | Hs.2642 | eukaryotic translation elongation factor 1 alpha 2 | |
| 438 | 367 | AL035081 | colon | metastatic | 22 | q13.1 | Hs.250696 | KDEL (Lys-Asp-Glu-Leu) endoplasmic | |
| | | | | | | | | reticulum protein retention receptor 3 | |
| 439 | 397 | Y15916 | colon | metastatic | 22 | q13.1 | Hs.172928 | collagen type I alpha 1 | |
| 440 | 418 | AI381686 | colon | metastatic | 22 | q13.2 | Hs.208912 | hypothetical protein MGC861 | |
| 441 | 506 | AA905821 | lung | primary | 1 | p31.3 | Hs.145958 | ESTs | |
| 442 | 508 | AI056599 | lung | primary | 1 | p31.3 | Hs.120893 | ESTs | |
| 443 | 511 | AW070459 | lung | primary | 1 | p31.3 | Hs.259438 | ESTs | |
| 444 | 527 | AK022113 | lung | primary | 1 | p31.3 | Hs.301858 | Homo sapiens cDNA FLJ13017 fis clone | |
| | | | | | | | | NT2RP3000628 | |
| 445 | 528 | AU151151 | lung | primary | 1 | p31.3 | Hs.11493 | Homo sapiens cDNA FLJ13536 fis clone | |
| | | | | | | | | PLACE1006521 | |
| 446 | 547 | AB044807 | lung | primary | 1 | p31.3 | Hs.321197 | PDZ domain protein (Drosophila inaD-like) | |
| 447 | 485 | AA012917 | lung | primary | 1 | p32.1 | Hs.333541 | beta-amyloid binding protein precursor | |
| 448 | 498 | BF224444 | lung | primary | 1 | p32.1 | Hs.127274 | ESTs | |
| 449 | 526 | AU147177 | lung | primary | 1 | p32.1 | Hs.301237 | Homo sapiens cDNA FLJ12095 fis clone | |
| | | | | | | | | HEMBB1002610 | |
| 450 | 473 | AA926959 | lung | primary | 1 | q21.3 | Hs.77550 | p53-regulated DDA3 | |
| 451 | 443 | AI053741 | lung | primary | 1 | q22 | Hs.133294 | ESTs | |
| 452 | 448 | AI766666 | lung | primary | 1 | q22 | Hs.374850 | apolipoprotein A-I binding protein | |
| 453 | 469 | AI739071 | lung | primary | 1 | q22 | Hs.158515 | hypothetical protein MGC13038 | |
| 454 | 441 | AF326731 | lung | primary | 1 | q23.3 | Hs.234545 | cell division cycle associated 1 | |
| 455 | 446 | BC002906 | lung | primary | 1 | q23.3 | Hs.75939 | uridine monophosphate kinase | |
| 456 | 442 | AA182412 | lung | primary | 1 | q25.3 | Hs.32058 | chromosome 1 open reading frame 19 | |
| 457 | 482 | AA725362 | lung | primary | 2 | p11.1 | NULL | unknown | |
| 458 | 472 | AI990317 | lung | primary | 2 | p13.1 | Hs.154672 | methylene tetrahydrofolate dehydrogenase | |
| | | | | | | | | (NAD+ dependent) methenyltetrahydrofolate | |
| | | | | | | | | cyclohydrolase | |
| 459 | 464 | AI191897 | lung | primary | 2 | p16.2 | Hs.105223 | Homo sapiens Similar to RIKEN cDNA | |
| | | | | | | | | 2510006C20 gene clone MGC: 24001 | |
| | | | | | | | | IMAGE: 4050858 mRNA complete cds | |
| 460 | 474 | AI492879 | lung | primary | 2 | p25.1 | Hs.75319 | ribonucleotide reductase M2 polypeptide | |
| 461 | 481 | H24953 | lung | primary | 2 | q13 | NULL | unknown | |
| 462 | 451 | AA749314 | lung | primary | 2 | q31.1 | Hs.333893 | cell division cycle associated 7 | |
| 463 | 519 | C00851 | lung | primary | 5 | p13.2 | Hs.144264 | ESTs Weakly similar to hypothetical protein | |
| | | | | | | | | FLJ20837 [Homo sapiens] [H. sapiens] | |
| 464 | 458 | AA383208 | lung | primary | 5 | p15.1 | Hs.125249 | ESTs | |
| 465 | 548 | AA524353 | lung | primary | 6 | p21.2 | Hs.27693 | peptidylprolyl isomerase (cyclophilin)-like 1 | |
| 466 | 522 | AW005489 | lung | primary | 6 | p21.31 | Hs.139800 | high mobility group AT-hook 1 | |
| 467 | 538 | AI677701 | lung | primary | 6 | p22.3 | Hs.201619 | hypothetical protein FLJ30829 | |
| 468 | 551 | BG528420 | lung | primary | 6 | p22.3 | Hs.83484 | SRY (sex determining region Y)-box 4 | |
| 469 | 467 | AI439141 | lung | primary | 6 | p23 | Hs.261023 | hypothetical protein FLJ20958 | |
| 470 | 539 | AI279547 | lung | primary | 6 | p24.1 | Hs.8645 | hypothetical protein LOC51256 | |
| 471 | 540 | W27692 | lung | primary | 6 | p24.2 | Hs.273077 | hypothetical protein MGC1223 | |
| 472 | 495 | K03193 | lung | primary | 7 | p11.2 | Hs.77432 | epidermal growth factor receptor | |
| | | | | | | | | (erythroblastic leukemia viral (v-erb-b) | |
| | | | | | | | | oncogene homolog avian) | |
| 473 | 496 | AI806160 | lung | primary | 7 | p11.2 | Hs.127991 | ESTs | |
| 474 | 497 | AW138673 | lung | primary | 7 | p11.2 | Hs.252928 | ESTs | |
| 475 | 502 | H65306 | lung | primary | 7 | p11.2 | Hs.205559 | ESTs | |
| 476 | 509 | AW971863 | lung | primary | 7 | p11.2 | Hs.103351 | ESTs | |
| 477 | 536 | D60436 | lung | primary | 7 | p11.2 | Hs.335933 | Homo sapiens clone MGC: 33530 | |
| | | | | | | | | IMAGE: 4820705 mRNA complete cds | |
| 478 | 545 | AI363001 | lung | primary | 7 | p11.2 | Hs.134342 | LanC lantibiotic synthetase component C-like | |
| | | | | | | | | 2 (bacterial) | |
| 479 | 524 | AV700815 | lung | primary | 7 | p12.3 | Hs.180171 | Homo sapiens cDNA FLJ10417 fis clone | |
| | | | | | | | | NT2RP1000112 | |
| 480 | 486 | AA740186 | lung | primary | 7 | p13 | Hs.81029 | biliverdin reductase A | |
| 481 | 510 | AI252004 | lung | primary | 7 | p13 | Hs.284148 | ESTs | |
| 482 | 514 | AW452419 | lung | primary | 7 | p13 | Hs.296098 | ESTs | |
| 483 | 515 | AI418313 | lung | primary | 7 | p13 | Hs.152895 | ESTs | |
| 484 | 517 | AI191118 | lung | primary | 7 | p13 | Hs.222015 | ESTs Moderately similar to cytokine receptor- | |
| | | | | | | | | like factor 2 cytokine receptor CRL2 precusor | |
| | | | | | | | | [Homo sapiens] | |
| 485 | 523 | AI823792 | lung | primary | 7 | p13 | Hs.301005 | histone H2A.F/Z variant | |
| 486 | 533 | AK025276 | lung | primary | 7 | p13 | Hs.306791 | Homo sapiens cDNA: FLJ21623 fis clone | |
| | | | | | | | | COL07915 | |
| 487 | 534 | AL137266 | lung | primary | 7 | p13 | Hs.332520 | Homo sapiens mRNA cDNA DKFZp434A1014 | |
| | | | | | | | | (from clone DKFZp434A1014) partial cds | |
| 488 | 542 | BC004903 | lung | primary | 7 | p13 | Hs.9960 | hypothetical protein MGC4607 | |
| 489 | 546 | AF192523 | lung | primary | 7 | p13 | Hs.47701 | NPC1 (Niemann-Pick disease type C1 gene)- | |
| | | | | | | | | like 1 | |
| 490 | 550 | AW194730 | lung | primary | 7 | p13 | Hs.9075 | serine/threonine kinase 17a (apoptosis- | |
| | | | | | | | | inducing) | |
| 491 | 541 | BC000769 | lung | primary | 7 | p14.1 | Hs.59594 | hypothetical protein MGC2821 | |
| 492 | 445 | U97188 | lung | primary | 7 | p15.3 | Hs.79440 | IGF-II mRNA-binding protein 3 | |
| 493 | 465 | AI910524 | lung | primary | 7 | p15.3 | Hs.87385 | hypothetical protein BC012331 | |
| 494 | 471 | AI806483 | lung | primary | 7 | p15.3 | Hs.108931 | membrane protein palmitoylated 6 (MAGUK | |
| | | | | | | | | p55 subfamily member 6) | |
| 495 | 494 | AW402635 | lung | primary | 7 | q22.1 | Hs.375569 | DNA directed RNA polymerase II polypeptide | |
| | | | | | | | | J-related gene | |
| 496 | 475 | AI922792 | lung | primary | 8 | NULL | Hs.239784 | scribble | |
| 497 | 489 | R51273 | lung | primary | 8 | q12.2 | Hs.250502 | carbonic anhydrase VIII | |
| 498 | 500 | BE465243 | lung | primary | 8 | q13.2 | Hs.12664 | ESTs | |
| 499 | 503 | AA132172 | lung | primary | 8 | q13.2 | Hs.19107 | ESTs | |
| 500 | 549 | AA203476 | lung | primary | 8 | q13.2 | Hs.252587 | pituitary tumor-transforming 1 | |
| 501 | 555 | AF232217 | lung | primary | 8 | q13.3 | NULL | unknown | |
| 502 | 556 | AF130055 | lung | primary | 8 | q13.3 | NULL | unknown | |
| 503 | 463 | BF002104 | lung | primary | 8 | q21.11 | Hs.168950 | Homo sapiens mRNA cDNA DKFZp566A1046 | |
| | | | | | | | | (from clone DKFZp566A1046) | |
| 504 | 507 | AI335223 | lung | primary | 8 | q21.11 | Hs.133293 | ESTs | |
| 505 | 512 | AI370381 | lung | primary | 8 | q21.11 | Hs.128841 | ESTs | |
| 506 | 529 | AK024242 | lung | primary | 8 | q21.11 | Hs.296753 | Homo sapiens cDNA FLJ14180 fis clone | |
| | | | | | | | | NT2RP2003799 | |
| 507 | 530 | AI701468 | lung | primary | 8 | q21.11 | Hs.60681 | Homo sapiens cDNA FLJ34367 fis clone | |
| | | | | | | | | FEBRA2016621 | |
| 508 | 480 | BG389015 | lung | primary | 8 | q21.13 | Hs.2384 | tumor protein D52 | |
| 509 | 499 | AA479492 | lung | primary | 8 | q21.13 | Hs.184387 | ESTs | |
| 510 | 488 | U07969 | lung | primary | 8 | q22.1 | Hs.89436 | cadherin 17 LI cadherin (liver-intestine) | |
| 511 | 491 | AF091433 | lung | primary | 8 | q22.1 | Hs.30464 | cyclin E2 | |
| 512 | 490 | AA584310 | lung | primary | 8 | q22.3 | Hs.283713 | collagen triple helix repeat containing 1 | |
| 513 | 505 | AA904882 | lung | primary | 8 | q22.3 | Hs.130107 | ESTs | |
| 514 | 543 | AA451665 | lung | primary | 8 | q24.13 | Hs.222088 | hypothetical protein MGC5254 | |
| 515 | 493 | W03103 | lung | primary | 8 | q24.22 | Hs.10669 | development and differentiation enhancing | |
| | | | | | | | | factor 1 | |
| 516 | 518 | BF055351 | lung | primary | 8 | q24.22 | Hs.20247 | ESTs Weakly similar to hypothetical protein | |
| | | | | | | | | FLJ20489 [Homo sapiens] [H. sapiens] | |
| 517 | 544 | BF941325 | lung | primary | 8 | q24.22 | Hs.15611 | KIAA1485 protein | |
| 518 | 535 | AW137073 | lung | primary | 8 | q24.23 | Hs.176669 | Homo sapiens mRNA cDNA DKFZp451M139 | |
| | | | | | | | | (from clone DKFZp451M139) | |
| 519 | 537 | AA447947 | lung | primary | 12 | p11.22 | Hs.227591 | hypothetical protein FLJ11088 | |
| 520 | 456 | R91766 | lung | primary | 12 | p11.23 | Hs.173074 | DKFZP564O1863 protein | |
| 521 | 466 | AF274950 | lung | primary | 12 | p11.23 | Hs.22595 | hypothetical protein FLJ10637 | |
| 522 | 470 | AI334297 | lung | primary | 12 | p11.23 | Hs.51743 | KIAA1340 protein | |
| 523 | 476 | AW779556 | lung | primary | 12 | p11.23 | Hs.184523 | serine/threonine kinase 38 like | |
| 524 | 478 | AI688580 | lung | primary | 12 | p11.23 | Hs.286145 | SRB7 suppressor of RNA polymerase B | |
| | | | | | | | | homolog (yeast) | |
| 525 | 483 | AF161472 | lung | primary | 12 | p11.23 | NULL | unknown | |
| 526 | 504 | BF724206 | lung | primary | 12 | p11.23 | Hs.221024 | ESTs | |
| 527 | 525 | AL118653 | lung | primary | 12 | p11.23 | Hs.284270 | Homo sapiens cDNA FLJ11335 fis clone | |
| | | | | | | | | PLACE1010630 | |
| 528 | 531 | AI652982 | lung | primary | 12 | p11.23 | Hs.111583 | Homo sapiens cDNA FLJ34764 fis clone | |
| | | | | | | | | NT2NE2002311 | |
| 529 | 553 | AA127950 | lung | primary | 12 | p11.23 | Hs.222024 | transcription factor BMAL2 | |
| 530 | 449 | AI652662 | lung | primary | 12 | p12.1 | Hs.317432 | branched chain aminotransferase 1 cytosolic | |
| 531 | 460 | AU154905 | lung | primary | 12 | p12.1 | Hs.296734 | Homo sapiens cDNA FLJ13318 fis clone | |
| | | | | | | | | OVARC1001600 | |
| 532 | 461 | AK025615 | lung | primary | 12 | p12.1 | Hs.7567 | Homo sapiens cDNA: FLJ21962 fis clone | |
| | | | | | | | | HEP05564 | |
| 533 | 462 | AA829940 | lung | primary | 12 | p12.1 | Hs.301210 | Homo sapiens mRNA cDNA DKFZp564F2072 | |
| | | | | | | | | (from clone DKFZp564F2072) | |
| 534 | 468 | BE326710 | lung | primary | 12 | p12.1 | Hs.170994 | hypothetical protein MGC10946 | |
| 535 | 484 | AA015609 | lung | primary | 12 | p12.1 | Hs.351221 | v-Ki-ras2 Kirsten rat sarcoma 2 viral oncogene | |
| | | | | | | | | homolog | |
| 536 | 501 | W70242 | lung | primary | 12 | p12.1 | Hs.58086 | ESTs | |
| 537 | 516 | AI242023 | lung | primary | 12 | p12.1 | Hs.137003 | ESTs | |
| 538 | 520 | AI003792 | lung | primary | 12 | p12.1 | Hs.120439 | ethanolamine kinase | |
| 539 | 554 | AA669106 | lung | primary | 12 | p12.2 | Hs.108106 | ubiquitin-like containing PHD and RING finger | |
| | | | | | | | | domains 1 | |
| 540 | 459 | BC003602 | lung | primary | 12 | p12.3 | Hs.36727 | H2A histone family member J | |
| 541 | 487 | AI392836 | lung | primary | 12 | p13.31 | Hs.12045 | C2f protein | |
| 542 | 492 | AI983033 | lung | primary | 12 | p13.31 | Hs.380623 | DEAD/H (Asp-Glu-Ala-Asp/His) box | |
| | | | | | | | | polypeptide 11 (CHL1-like helicase homolog S. cerevisiae) | |
| 543 | 521 | U74612 | lung | primary | 12 | p13.33 | Hs.239 | forkhead box M1 | |
| 544 | 455 | AF213033 | lung | primary | 14 | q22.1 | Hs.84113 | cyclin-dependent kinase inhibitor 3 (CDK2- | |
| | | | | | | | | associated dual specificity phosphatase) | |
| 545 | 447 | AF167438 | lung | primary | 14 | q23.2 | Hs.179817 | androgen-regulated short-chain | |
| | | | | | | | | dehydrogenase/reductase 1 | |
| 546 | 513 | AI146765 | lung | primary | 18 | p11.31 | Hs.373550 | ESTs | |
| 547 | 532 | AW003207 | lung | primary | 18 | p11.31 | Hs.48659 | Homo sapiens cDNA FLJ36057 fis clone | |
| | | | | | | | | TESTI2018475 highly similar to LAMININ | |
| | | | | | | | | ALPHA-1 CHAIN PRECURSOR | |
| 548 | 444 | AF017790 | lung | primary | 18 | p11.32 | Hs.58169 | highly expressed in cancer rich in leucine | |
| | | | | | | | | heptad repeats | |
| 549 | 450 | AB023169 | lung | primary | 20 | p12.2 | Hs.7935 | BTB (POZ) domain containing 3 | |
| 550 | 457 | AI732446 | lung | primary | 20 | p12.2 | Hs.70903 | ESTs | |
| 551 | 479 | D21267 | lung | primary | 20 | p12.2 | Hs.84389 | synaptosomal-associated protein 25 kDa | |
| 552 | 452 | Y00064 | lung | primary | 20 | p12.3 | Hs.2281 | chromogranin B (secretogranin 1) | |
| 553 | 453 | AI096882 | lung | primary | 20 | p13 | Hs.135056 | chromosome 20 open reading frame 139 | |
| 554 | 454 | AI949781 | lung | primary | 20 | p13 | Hs.26802 | chromosome 20 open reading frame 97 | |
| 555 | 477 | AI924533 | lung | primary | 20 | p13 | Hs.105607 | solute carrier family 4 sodium bicarbonate | |
| | | | | | | | | transporter-like member 11 | |
| 556 | 552 | U85658 | lung | primary | 20 | q13.31 | Hs.61796 | transcription factor AP-2 gamma (activating | |
| | | | | | | | | enhancer binding protein 2 gamma) | |
| 557 | 654 | AW151887 | lung | metastatic | 1 | p22.3 | Hs.169939 | heparan sulfate 2-O-sulfotransferase 1 | |
| 558 | 651 | BE645144 | lung | metastatic | 1 | p31.1 | Hs.374411 | ESTs Moderately similar to hypothetical | |
| | | | | | | | | protein FLJ20378 [Homo sapiens] [H. sapiens] | |
| 559 | 619 | AI810054 | lung | metastatic | 1 | p31.2 | Hs.133260 | hypothetical protein FLJ20354 | |
| 560 | 629 | N32508 | lung | metastatic | 1 | p31.2 | Hs.8107 | G-protein gamma-12 subunit | |
| 561 | 636 | BC002488 | lung | metastatic | 1 | p31.2 | Hs.165998 | PAI-1 mRNA-binding protein | |
| 562 | 628 | AA618420 | lung | metastatic | 1 | p32.1 | Hs.299254 | Homo sapiens cDNA: FLJ23597 fis clone | |
| | | | | | | | | LNG15281 | |
| 563 | 627 | AW140098 | lung | metastatic | 1 | p32.3 | Hs.25821 | Fas (TNFRSF6) associated factor 1 | |
| 564 | 648 | AW409848 | lung | metastatic | 1 | p32.3 | Hs.13036 | DKFZP727A071 protein | |
| 565 | 637 | AF151063 | lung | metastatic | 1 | p34.1 | NULL | unknown | |
| 566 | 600 | AA926959 | lung | metastatic | 1 | q21.3 | Hs.77550 | p53-regulated DDA3 | |
| 567 | 576 | AI766666 | lung | metastatic | 1 | q22 | Hs.374850 | apolipoprotein A-I binding protein | |
| 568 | 588 | AI690773 | lung | metastatic | 1 | q22 | Hs.133294 | ESTs | |
| 569 | 601 | AI739071 | lung | metastatic | 1 | q22 | Hs.158515 | hypothetical protein MGC13038 | |
| 570 | 561 | AF326731 | lung | metastatic | 1 | q23.3 | Hs.234545 | cell division cycle associated 1 | |
| 571 | 562 | D78335 | lung | metastatic | 1 | q23.3 | Hs.75939 | uridine monophosphate kinase | |
| 572 | 558 | AA182412 | lung | metastatic | 1 | q25.3 | Hs.32058 | chromosome 1 open reading frame 19 | |
| 573 | 599 | AA725362 | lung | metastatic | 2 | p11.1 | NULL | unknown | |
| 574 | 592 | AI990317 | lung | metastatic | 2 | p13.1 | Hs.154672 | methylene tetrahydrofolate dehydrogenase | |
| | | | | | | | | (NAD+ dependent) methenyltetrahydrofolate | |
| | | | | | | | | cyclohydrolase | |
| 575 | 603 | AI191897 | lung | metastatic | 2 | p16.2 | Hs.105223 | Homo sapiens Similar to RIKEN cDNA | |
| | | | | | | | | 2510006C20 gene clone MGC: 24001 | |
| | | | | | | | | IMAGE: 4050858 mRNA complete cds | |
| 576 | 583 | BC001886 | lung | metastatic | 2 | p25.1 | Hs.75319 | ribonucleotide reductase M2 polypeptide | |
| 577 | 605 | H24953 | lung | metastatic | 2 | q13 | NULL | unknown | |
| 578 | 575 | AA749314 | lung | metastatic | 2 | q31.1 | Hs.333893 | cell division cycle associated 7 | |
| 579 | 579 | AA868748 | lung | metastatic | 5 | p15.1 | Hs.125249 | ESTs | |
| 580 | 589 | AI439141 | lung | metastatic | 6 | p23 | Hs.261023 | hypothetical protein FLJ20958 | |
| 581 | 606 | AU156822 | lung | metastatic | 7 | p11.2 | Hs.287577 | Homo sapiens cDNA FLJ13503 fis clone | |
| | | | | | | | | PLACE1004838 | |
| 582 | 607 | U48722 | lung | metastatic | 7 | p11.2 | NULL | unknown | |
| 583 | 609 | AA768884 | lung | metastatic | 7 | p11.2 | Hs.140489 | Homo sapiens cDNA FLJ25559 fis clone | |
| | | | | | | | | JTH02834 | |
| 584 | 610 | AK000106 | lung | metastatic | 7 | p11.2 | Hs.272227 | Homo sapiens cDNA FLJ20099 fis clone | |
| | | | | | | | | COL04544 | |
| 585 | 613 | AU147861 | lung | metastatic | 7 | p11.2 | Hs.188082 | Homo sapiens cDNA FLJ12308 fis clone | |
| | | | | | | | | MAMMA1001931 | |
| 586 | 616 | BE737030 | lung | metastatic | 7 | p11.2 | Hs.82916 | chaperonin containing TCP1 subunit 6A (zeta | |
| | | | | | | | | 1) | |
| 587 | 622 | AW157070 | lung | metastatic | 7 | p11.2 | Hs.77432 | epidermal growth factor receptor | |
| | | | | | | | | (erythroblastic leukemia viral (v-erb-b) | |
| | | | | | | | | oncogene homolog avian) | |
| 588 | 639 | BE878463 | lung | metastatic | 7 | p11.2 | Hs.279898 | Homo sapiens cDNA: FLJ23165 fis clone | |
| | | | | | | | | LNG09846 | |
| 589 | 557 | AK023208 | lung | metastatic | 7 | p14.2 | Hs.62180 | anillin actin binding protein (scraps homolog | |
| | | | | | | | | Drosophila) | |
| 590 | 560 | U97188 | lung | metastatic | 7 | p15.3 | Hs.79440 | IGF-II mRNA-binding protein 3 | |
| 591 | 577 | AI910524 | lung | metastatic | 7 | p15.3 | Hs.87385 | hypothetical protein BC012331 | |
| 592 | 590 | AI806483 | lung | metastatic | 7 | p15.3 | Hs.108931 | membrane protein palmitoylated 6 (MAGUK | |
| | | | | | | | | p55 subfamily member 6) | |
| 593 | 617 | AL136770 | lung | metastatic | 7 | q21.13 | Hs.258576 | claudin 12 | |
| 594 | 635 | BF680588 | lung | metastatic | 7 | q21.13 | Hs.118258 | Homo sapiens cDNA: FLJ23160 fis clone | |
| | | | | | | | | LNG09682 | |
| 595 | 618 | U19348 | lung | metastatic | 7 | q31.2 | NULL | unknown | |
| 596 | 638 | BG170541 | lung | metastatic | 7 | q31.2 | Hs.285754 | met proto-oncogene (hepatocyte growth factor | |
| | | | | | | | | receptor) | |
| 597 | 641 | AI632244 | lung | metastatic | 7 | q32.1 | Hs.233694 | putative methyltransferase | |
| 598 | 653 | AI964022 | lung | metastatic | 7 | q33 | Hs.107394 | secretory protein SEC8 | |
| 599 | 593 | AI922792 | lung | metastatic | 8 | NULL | Hs.239784 | scribble | |
| 600 | 644 | AA723810 | lung | metastatic | 8 | NULL | Hs.69517 | cDNA for differentially expressed CO16 gene | |
| 601 | 621 | BF059124 | lung | metastatic | 8 | q12.3 | Hs.29419 | ESTs | |
| 602 | 631 | AA543030 | lung | metastatic | 8 | q12.3 | Hs.152409 | ESTs | |
| 603 | 632 | AF289489 | lung | metastatic | 8 | q12.3 | Hs.283664 | aspartate beta-hydroxylase | |
| 604 | 646 | AW663544 | lung | metastatic | 8 | q13.1 | Hs.85524 | ring finger protein 29 | |
| 605 | 581 | BF002104 | lung | metastatic | 8 | q21.11 | Hs.168950 | Homo sapiens mRNA cDNA DKFZp566A1046 | |
| | | | | | | | | (from clone DKFZp566A1046) | |
| 606 | 612 | AI916600 | lung | metastatic | 8 | q21.11 | Hs.121194 | Homo sapiens cDNA: FLJ21569 fis clone | |
| | | | | | | | | COL06508 | |
| 607 | 623 | AI625741 | lung | metastatic | 8 | q21.11 | Hs.21275 | hypothetical protein FLJ11011 | |
| 608 | 630 | AW150720 | lung | metastatic | 8 | q21.11 | Hs.356086 | ESTs Weakly similar to retinal short-chain | |
| | | | | | | | | dehydrogenase/reductase retSDR2 [Homo | |
| | | | | | | | | sapiens] [H. sapiens] | |
| 609 | 645 | N89607 | lung | metastatic | 8 | q21.11 | Hs.184693 | transcription elongation factor B (SIII) | |
| | | | | | | | | polypeptide 1 (15 kDa elongin C) | |
| 610 | 650 | W46994 | lung | metastatic | 8 | q21.11 | Hs.96870 | staufen RNA binding protein homolog 2 | |
| | | | | | | | | (Drosophila) | |
| 611 | 563 | BG389015 | lung | metastatic | 8 | q21.13 | Hs.2384 | tumor protein D52 | |
| 612 | 633 | AK000049 | lung | metastatic | 8 | q21.13 | Hs.183861 | hypothetical protein MGC22825 | |
| 613 | 634 | AK024296 | lung | metastatic | 8 | q21.13 | Hs.237146 | zinc finger protein RINZF | |
| 614 | 656 | AL039862 | lung | metastatic | 8 | q24.21 | Hs.49136 | Homo sapiens cDNA FLJ23705 fis clone | |
| | | | | | | | | HEP11066 | |
| 615 | 611 | M26095 | lung | metastatic | 11 | p15.2 | Hs.37058 | calcitonin/calcitonin-related polypeptide alpha | |
| 616 | 565 | AF256215 | lung | metastatic | 12 | p11.23 | Hs.222024 | transcription factor BMAL2 | |
| 617 | 566 | AI569851 | lung | metastatic | 12 | p11.23 | Hs.22595 | hypothetical protein FLJ10637 | |
| 618 | 573 | AF161472 | lung | metastatic | 12 | p11.23 | NULL | unknown | |
| 619 | 574 | U46837 | lung | metastatic | 12 | p11.23 | Hs.286145 | SRB7 suppressor of RNA polymerase B | |
| | | | | | | | | homolog (yeast) | |
| 620 | 580 | R91766 | lung | metastatic | 12 | p11.23 | Hs.173074 | DKFZP564O1863 protein | |
| 621 | 584 | AI334297 | lung | metastatic | 12 | p11.23 | Hs.51743 | KIAA1340 protein | |
| 622 | 585 | AW779556 | lung | metastatic | 12 | p11.23 | Hs.184523 | serine/threonine kinase 38 like | |
| 623 | 586 | BF540749 | lung | metastatic | 12 | p11.23 | Hs.111583 | Homo sapiens cDNA FLJ34764 fis clone | |
| | | | | | | | | NT2NE2002311 | |
| 624 | 587 | BC005176 | lung | metastatic | 12 | p11.23 | Hs.10071 | seven transmembrane protein TM7SF3 | |
| 625 | 564 | AI652662 | lung | metastatic | 12 | p12.1 | Hs.317432 | branched chain aminotransferase 1 cytosolic | |
| 626 | 568 | AK025615 | lung | metastatic | 12 | p12.1 | Hs.7567 | Homo sapiens cDNA: FLJ21962 fis clone | |
| | | | | | | | | HEP05564 | |
| 627 | 570 | BE326710 | lung | metastatic | 12 | p12.1 | Hs.170994 | hypothetical protein MGC10946 | |
| 628 | 595 | AA829940 | lung | metastatic | 12 | p12.1 | Hs.301210 | Homo sapiens mRNA cDNA DKFZp564F2072 | |
| | | | | | | | | (from clone DKFZp564F2072) | |
| 629 | 597 | AA015609 | lung | metastatic | 12 | p12.1 | Hs.351221 | v-Ki-ras2 Kirsten rat sarcoma 2 viral oncogene | |
| | | | | | | | | homolog | |
| 630 | 604 | AU154905 | lung | metastatic | 12 | p12.1 | Hs.296734 | Homo sapiens cDNA FLJ13318 fis clone | |
| | | | | | | | | OVARC1001600 | |
| 631 | 571 | AK025578 | lung | metastatic | 12 | p12.2 | Hs.108106 | ubiquitin-like containing PHD and RING finger | |
| | | | | | | | | domains 1 | |
| 632 | 578 | BC003602 | lung | metastatic | 12 | p12.3 | Hs.36727 | H2A histone family member J | |
| 633 | 643 | AI743489 | lung | metastatic | 12 | p13.1 | Hs.322679 | Homo sapiens cDNA FLJ36082 fis clone | |
| | | | | | | | | TESTI2019998 | |
| 634 | 642 | AA102574 | lung | metastatic | 14 | q12 | Hs.8858 | bromodomain adjacent to zinc finger domain | |
| | | | | | | | | 1A | |
| 635 | 620 | AI953589 | lung | metastatic | 14 | q13.1 | Hs.146134 | ESTs | |
| 636 | 608 | AW268365 | lung | metastatic | 14 | q21.3 | Hs.25740 | ERO1-like (S. cerevisiae) | |
| 637 | 626 | BC006117 | lung | metastatic | 14 | q21.3 | Hs.222021 | hypothetical protein FLJ12618 | |
| 638 | 655 | AJ292969 | lung | metastatic | 14 | q21.3 | Hs.288906 | WW45 protein | |
| 639 | 567 | AF213033 | lung | metastatic | 14 | q22.1 | Hs.84113 | cyclin-dependent kinase inhibitor 3 (CDK2- | |
| | | | | | | | | associated dual specificity phosphatase) | |
| 640 | 652 | BC005359 | lung | metastatic | 14 | q22.1 | Hs.151413 | glia maturation factor beta | |
| 641 | 614 | AI985034 | lung | metastatic | 14 | q23.1 | Hs.2704 | glutathione peroxidase 2 (gastrointestinal) | |
| 642 | 624 | AI554514 | lung | metastatic | 14 | q23.1 | Hs.97849 | ESTs | |
| 643 | 569 | AF167438 | lung | metastatic | 14 | q23.2 | Hs.179817 | androgen-regulated short-chain | |
| | | | | | | | | dehydrogenase/reductase 1 | |
| 644 | 625 | AI654093 | lung | metastatic | 14 | q23.2 | Hs.43397 | Homo sapiens cDNA FLJ37574 fis clone | |
| | | | | | | | | BRCOC2003100 | |
| 645 | 647 | BE465894 | lung | metastatic | 14 | q24.2 | Hs.98365 | hypothetical protein FLJ39091 | |
| 646 | 615 | AI969102 | lung | metastatic | 14 | q32.11 | Hs.172216 | chromogranin A (parathyroid secretory protein | |
| | | | | | | | | 1) | |
| 647 | 640 | AI656232 | lung | metastatic | 14 | q32.11 | Hs.90034 | hypothetical protein FLJ21916 | |
| 648 | 649 | AI670847 | lung | metastatic | 14 | q32.12 | Hs.374662 | Homo sapiens cDNA FLJ40513 fis clone | |
| | | | | | | | | TESTI2046456 | |
| 649 | 559 | AF017790 | lung | metastatic | 18 | p11.32 | Hs.58169 | highly expressed in cancer rich in leucine | |
| | | | | | | | | heptad repeats | |
| 650 | 591 | D21267 | lung | metastatic | 20 | p12.2 | Hs.84389 | synaptosomal-associated protein 25 kDa | |
| 651 | 598 | AI732446 | lung | metastatic | 20 | p12.2 | Hs.70903 | ESTs | |
| 652 | 602 | AB023169 | lung | metastatic | 20 | p12.2 | Hs.7935 | BTB (POZ) domain containing 3 | |
| 653 | 572 | Y00064 | lung | metastatic | 20 | p12.3 | Hs.2281 | chromogranin B (secretogranin 1) | |
| 654 | 582 | AI949781 | lung | metastatic | 20 | p13 | Hs.26802 | chromosome 20 open reading frame 97 | |
| 655 | 594 | AF336127 | lung | metastatic | 20 | p13 | Hs.105607 | solute carrier family 4 sodium bicarbonate | |
| | | | | | | | | transporter-like member 11 | |
| 656 | 596 | AI096882 | lung | metastatic | 20 | p13 | Hs.135056 | chromosome 20 open reading frame 139 | |
| 657 | 662 | AK000490 | prostate | primary | 1 | p31.2 | Hs.133260 | hypothetical protein FLJ20354 | |
| 658 | 659 | AW271106 | prostate | primary | 1 | q22 | Hs.133294 | ESTs | |
| 659 | 660 | AI053741 | prostate | primary | 1 | q22 | Hs.133294 | ESTs | |
| 660 | 663 | AA830844 | prostate | primary | 1 | q23.2 | Hs.127310 | kinase interacting with leukemia-associated | |
| | | | | | | | | gene (stathmin) | |
| 661 | 657 | AF326731 | prostate | primary | 1 | q23.3 | Hs.234545 | cell division cycle associated 1 | |
| 662 | 661 | AB032931 | prostate | primary | 1 | q32.1 | Hs.5199 | HSPC150 protein similar to ubiquitin- | |
| | | | | | | | | conjugating enzyme | |
| 663 | 658 | U30872 | prostate | primary | 1 | q32.3 | Hs.77204 | centromere protein F 350/400 ka (mitosin) | |
| 664 | 684 | AI492879 | prostate | primary | 2 | p25.1 | Hs.75319 | ribonucleotide reductase M2 polypeptide | |
| 665 | 683 | N21131 | prostate | primary | 2 | q37.3 | Hs.42949 | hairy and enhancer of split 6 (Drosophila) | |
| 666 | 690 | BE407516 | prostate | primary | 5 | q13.2 | Hs.23960 | cyclin B1 | |
| 667 | 691 | U70370 | prostate | primary | 5 | q31.1 | Hs.84136 | paired-like homeodomain transcription factor 1 | |
| 668 | 692 | BE794699 | prostate | primary | 6 | p21.2 | Hs.284207 | hypothetical protein BC003515 | |
| 669 | 694 | AI343467 | prostate | primary | 7 | p14.1 | Hs.28792 | Homo sapiens cDNA FLJ11041 fis clone | |
| | | | | | | | | PLACE1004405 | |
| 670 | 695 | M13436 | prostate | primary | 7 | p14.1 | Hs.727 | inhibin beta A (activin A activin AB alpha | |
| | | | | | | | | polypeptide) | |
| 671 | 693 | AK023208 | prostate | primary | 7 | p14.2 | Hs.62180 | anillin actin binding protein (scraps homolog | |
| | | | | | | | | Drosophila) | |
| 672 | 698 | AI932328 | prostate | primary | 8 | p21.1 | Hs.104741 | T-LAK cell-originated protein kinase | |
| 673 | 697 | AA203476 | prostate | primary | 8 | q13.2 | Hs.252587 | pituitary tumor-transforming 1 | |
| 674 | 696 | AI925583 | prostate | primary | 8 | q24.13 | Hs.222088 | hypothetical protein MGC5254 | |
| 675 | 700 | BE544837 | prostate | primary | 9 | q33.2 | Hs.352417 | Homo sapiens Similar to RIKEN cDNA | |
| | | | | | | | | 3321402G02 gene clone MGC: 23929 | |
| | | | | | | | | IMAGE: 4807540 mRNA complete cds | |
| 676 | 699 | AI983261 | prostate | primary | 9 | q34.3 | Hs.323445 | ESTs Weakly similar to T2D3_HUMAN | |
| | | | | | | | | Transcription initiation factor TFIID 135 kDa | |
| | | | | | | | | subunit (TAFII-135) (TAFII135) | |
| 677 | 664 | X05360 | prostate | primary | 10 | q21.2 | Hs.334562 | cell division cycle 2 G1 to S and G2 to M | |
| 678 | 665 | AI674163 | prostate | primary | 10 | q23.33 | Hs.14559 | hypothetical protein FLJ10540 | |
| 679 | 666 | BE614410 | prostate | primary | 11 | q13.1 | Hs.23044 | similar to RIKEN cDNA 2610036L13 | |
| 680 | 667 | U74612 | prostate | primary | 12 | p13.33 | Hs.239 | forkhead box M1 | |
| 681 | 668 | R61322 | prostate | primary | 12 | q24.31 | Hs.204166 | Human clone 295 5cM region surrounding | |
| | | | | | | | | hepatocyte nuclear factor-1a/MODY3 mRNA | |
| 682 | 669 | L25876 | prostate | primary | 14 | q22.1 | Hs.84113 | cyclin-dependent kinase inhibitor 3 (CDK2- | |
| | | | | | | | | associated dual specificity phosphatase) | |
| 683 | 670 | U65410 | prostate | primary | 14 | q23.1 | Hs.79078 | MAD2 mitotic arrest deficient-like 1 (yeast) | |
| 684 | 671 | AL080146 | prostate | primary | 15 | q21.3 | Hs.194698 | cyclin B2 | |
| 685 | 672 | D14657 | prostate | primary | 15 | q22.2 | Hs.81892 | KIAA0101 gene product | |
| 686 | 674 | AB018009 | prostate | primary | 16 | NULL | Hs.184601 | solute carrier family 7 (cationic amino acid | |
| | | | | | | | | transporter y+ system) member 5 | |
| 687 | 673 | AI819340 | prostate | primary | 16 | p13.3 | Hs.13561 | hypothetical protein MGC4692 | |
| 688 | 678 | BE328850 | prostate | primary | 17 | q11.2 | Hs.348504 | hypothetical protein BC014072 | |
| 689 | 679 | AF063308 | prostate | primary | 17 | q11.2 | Hs.16244 | mitotic spindle coiled-coil related protein | |
| 690 | 676 | AW003286 | prostate | primary | 17 | q21.31 | Hs.370428 | ESTs Moderately similar to TP2A_HUMAN | |
| | | | | | | | | DNA topoisomerase II alpha isozyme | |
| | | | | | | | | [H. sapiens] | |
| 691 | 680 | AI375913 | prostate | primary | 17 | q21.31 | Hs.156346 | topoisomerase (DNA) II alpha 170 kDa | |
| 692 | 681 | L47276 | prostate | primary | 17 | q21.31 | NULL | unknown | |
| 693 | 677 | BG165011 | prostate | primary | 17 | q23.2 | Hs.165909 | ESTs Weakly similar to hypothetical protein | |
| | | | | | | | | FLJ20489 [Homo sapiens] [H. sapiens] | |
| 694 | 675 | BF056791 | prostate | primary | 17 | q23.3 | Hs.87507 | ESTs | |
| 695 | 682 | AA719022 | prostate | primary | 19 | q13.43 | Hs.288549 | ubiquitin UBF-fl | |
| 696 | 686 | D80008 | prostate | primary | 20 | p11.21 | Hs.36232 | KIAA0186 gene product | |
| 697 | 685 | AF098158 | prostate | primary | 20 | q11.1 | Hs.9329 | chromosome 20 open reading frame 1 | |
| 698 | 688 | U73379 | prostate | primary | 20 | q13.12 | Hs.93002 | ubiquitin-conjugating enzyme E2C | |
| 699 | 687 | AF011468 | prostate | primary | 20 | q13.31 | Hs.250822 | serine/threonine kinase 6 | |
| 700 | 701 | T77624 | prostate | primary | 21 | q22.13 | Hs.79375 | holocarboxylase synthetase (biotin-[proprionyl- | |
| | | | | | | | | Coenzyme A-carboxylase (ATP-hydrolysing)] | |
| | | | | | | | | ligase) | |
| 701 | 689 | AI381686 | prostate | primary | 22 | q13.2 | Hs.208912 | hypothetical protein MGC861 | |
| 702 | 723 | AA630330 | prostate | metastatic | 1 | q21.2 | Hs.89545 | proteasome (prosome macropain) subunit beta | |
| | | | | | | | | type 4 | |
| 703 | 771 | AW271106 | prostate | metastatic | 1 | q22 | Hs.133294 | ESTs | |
| 704 | 773 | AI690773 | prostate | metastatic | 1 | q22 | Hs.133294 | ESTs | |
| 705 | 803 | AI766666 | prostate | metastatic | 1 | q22 | Hs.374850 | apolipoprotein A-I binding protein | |
| 706 | 739 | AI249980 | prostate | metastatic | 1 | q23.2 | Hs.127310 | kinase interacting with leukemia-associated | |
| | | | | | | | | gene (stathmin) | |
| 707 | 798 | AI015982 | prostate | metastatic | 1 | q23.3 | Hs.234545 | cell division cycle associated 1 | |
| 708 | 745 | H62656 | prostate | metastatic | 1 | q24.3 | Hs.300893 | hypothetical protein MGC17528 | |
| 709 | 753 | N29457 | prostate | metastatic | 1 | q31.1 | Hs.117305 | hypothetical gene supported by BC007071 | |
| 710 | 796 | U30872 | prostate | metastatic | 1 | q32.3 | Hs.77204 | centromere protein F 350/400 ka (mitosin) | |
| 711 | 794 | AA151971 | prostate | metastatic | 1 | q42.2 | Hs.334372 | chorionic somatomammotropin hormone 2 | |
| 712 | 748 | AI971357 | prostate | metastatic | 3 | p21.32 | Hs.146170 | hypothetical protein FLJ22969 | |
| 713 | 778 | W24316 | prostate | metastatic | 3 | q12.3 | Hs.173374 | endothelial and smooth muscle cell-derived | |
| | | | | | | | | neuropilin-like protein | |
| 714 | 716 | AI338462 | prostate | metastatic | 3 | q26.1 | Hs.50758 | SMC4 structural maintenance of | |
| | | | | | | | | chromosomes 4-like 1 (yeast) | |
| 715 | 717 | AB019987 | prostate | metastatic | 3 | q26.1 | Hs.50758 | SMC4 structural maintenance of | |
| | | | | | | | | chromosomes 4-like 1 (yeast) | |
| 716 | 740 | AL119157 | prostate | metastatic | 3 | q26.32 | Hs.22941 | KIAA1363 protein | |
| 717 | 777 | BG170335 | prostate | metastatic | 3 | q26.32 | Hs.122579 | epithelial cell transforming sequence 2 | |
| | | | | | | | | oncogene | |
| 718 | 704 | AI968388 | prostate | metastatic | 3 | q26.33 | NULL | unknown | |
| 719 | 724 | AA194529 | prostate | metastatic | 3 | q28 | Hs.74619 | proteasome (prosome macropain) 26S subunit | |
| | | | | | | | | non-ATPase 2 | |
| 720 | 760 | BE256479 | prostate | metastatic | 5 | p14.3 | Hs.79037 | heat shock 60 kDa protein 1 (chaperonin) | |
| 721 | 705 | AI750154 | prostate | metastatic | 5 | p15.1 | NULL | unknown | |
| 722 | 711 | U96131 | prostate | metastatic | 5 | p15.33 | Hs.6566 | thyroid hormone receptor interactor 13 | |
| 723 | 787 | M25753 | prostate | metastatic | 5 | q13.2 | Hs.23960 | cyclin B1 | |
| 724 | 758 | AI369840 | prostate | metastatic | 6 | p21.1 | Hs.374582 | Homo sapiens cDNA FLJ11842 fis clone | |
| | | | | | | | | HEMBA1006652 weakly similar to 60S | |
| | | | | | | | | RIBOSOMAL PROTEIN L7 | |
| 725 | 804 | AK023208 | prostate | metastatic | 7 | p14.2 | Hs.62180 | anillin actin binding protein (scraps homolog | |
| | | | | | | | | Drosophila) | |
| 726 | 752 | AI910524 | prostate | metastatic | 7 | p15.3 | Hs.87385 | hypothetical protein BC012331 | |
| 727 | 721 | L07493 | prostate | metastatic | 7 | p21.3 | Hs.1608 | replication protein A3 14 kDa | |
| 728 | 730 | AL582836 | prostate | metastatic | 7 | q21.3 | Hs.137476 | paternally expressed 10 | |
| 729 | 770 | AI922470 | prostate | metastatic | 7 | q21.3 | Hs.370106 | ESTs Highly similar to asparagine synthetase | |
| | | | | | | | | [Homo sapiens] [H. sapiens] | |
| 730 | 726 | L37127 | prostate | metastatic | 7 | q22.1 | Hs.80475 | polymerase (RNA) II (DNA directed) | |
| | | | | | | | | polypeptide J 13.3 kDa | |
| 731 | 736 | AA193396 | prostate | metastatic | 7 | q31.2 | Hs.285754 | met proto-oncogene (hepatocyte growth factor | |
| | | | | | | | | receptor) | |
| 732 | 768 | AI679933 | prostate | metastatic | 7 | q33 | Hs.369347 | ESTs Weakly similar to hypothetical protein | |
| | | | | | | | | FLJ20378 [Homo sapiens] [H. sapiens] | |
| 733 | 763 | AI571298 | prostate | metastatic | 8 | NULL | Hs.343589 | exosome component Rrp41 | |
| 734 | 732 | AA191576 | prostate | metastatic | 8 | q12.1 | Hs.9614 | nucleophosmin (nucleolar phosphoprotein B23 | |
| | | | | | | | | numatrin) | |
| 735 | 801 | AW001796 | prostate | metastatic | 8 | q12.3 | Hs.283664 | aspartate beta-hydroxylase | |
| 736 | 729 | AA203476 | prostate | metastatic | 8 | q13.2 | Hs.252587 | pituitary tumor-transforming 1 | |
| 737 | 795 | AI525903 | prostate | metastatic | 8 | q13.3 | Hs.118554 | CGI-83 protein | |
| 738 | 710 | AA995715 | prostate | metastatic | 8 | q21.11 | Hs.184693 | transcription elongation factor B (SIII) | |
| | | | | | | | | polypeptide 1 (15 kDa elongin C) | |
| 739 | 782 | BE409290 | prostate | metastatic | 8 | q22.3 | Hs.273344 | DKFZP564O0463 protein | |
| 740 | 788 | AA584310 | prostate | metastatic | 8 | q22.3 | Hs.283713 | collagen triple helix repeat containing 1 | |
| 741 | 769 | BF109660 | prostate | metastatic | 8 | q23.1 | Hs.127286 | ESTs Moderately similar to leucine-rich | |
| | | | | | | | | neuronal protein [Homo sapiens] [H. sapiens] | |
| 742 | 789 | AI802955 | prostate | metastatic | 8 | q23.2 | Hs.195870 | chronic myelogenous leukemia tumor antigen | |
| | | | | | | | | 66 | |
| 743 | 737 | AL117612 | prostate | metastatic | 8 | q24.12 | Hs.76550 | mal T-cell differentiation protein 2 | |
| 744 | 756 | AI880004 | prostate | metastatic | 8 | q24.22 | Hs.356036 | Homo sapiens mRNA cDNA DKFZp666E036 | |
| | | | | | | | | (from clone DKFZp666E036) | |
| 745 | 784 | AI023398 | prostate | metastatic | 8 | q24.22 | Hs.10669 | development and differentiation enhancing | |
| | | | | | | | | factor 1 | |
| 746 | 706 | AA527374 | prostate | metastatic | 8 | q24.23 | NULL | unknown | |
| 747 | 702 | AF067656 | prostate | metastatic | 10 | q21.1 | Hs.42650 | ZW10 interactor | |
| 748 | 799 | AF154332 | prostate | metastatic | 10 | q21.2 | Hs.334562 | cell division cycle 2 G1 to S and G2 to M | |
| 749 | 802 | BC006121 | prostate | metastatic | 10 | q22.1 | Hs.117062 | apoptosis-inducing factor (AIF)-homologous | |
| | | | | | | | | mitochondrion-associated inducer of death | |
| 750 | 728 | K03226 | prostate | metastatic | 10 | q22.2 | Hs.77274 | plasminogen activator urokinase | |
| 751 | 805 | U90339 | prostate | metastatic | 10 | q22.2 | Hs.94382 | adenosine kinase | |
| 752 | 725 | AI198535 | prostate | metastatic | 10 | q22.3 | Hs.89463 | potassium large conductance calcium- | |
| | | | | | | | | activated channel subfamily M alpha member 1 | |
| 753 | 734 | N27428 | prostate | metastatic | 10 | q23.31 | Hs.240 | M-phase phosphoprotein 1 | |
| 754 | 751 | AI674163 | prostate | metastatic | 10 | q23.33 | Hs.14559 | hypothetical protein FLJ10540 | |
| 755 | 718 | BE614410 | prostate | metastatic | 11 | q13.1 | Hs.23044 | similar to RIKEN cDNA 2610036L13 | |
| 756 | 761 | BG251266 | prostate | metastatic | 11 | q13.1 | Hs.283565 | FOS-like antigen 1 | |
| 757 | 733 | AA621983 | prostate | metastatic | 11 | q13.3 | Hs.116051 | myeloma overexpressed gene (in a subset of | |
| | | | | | | | | t(11 14) positive multiple myelomas) | |
| 758 | 722 | U82984 | prostate | metastatic | 12 | q13.12 | Hs.23900 | Rac GTPase activating protein 1 | |
| 759 | 747 | AF091087 | prostate | metastatic | 12 | q13.12 | Hs.206501 | hypothetical protein from clone 643 | |
| 760 | 754 | AI936946 | prostate | metastatic | 12 | q13.12 | Hs.121973 | Homo sapiens clone MGC: 20874 | |
| | | | | | | | | IMAGE: 4547239 mRNA complete cds | |
| 761 | 707 | AL118633 | prostate | metastatic | 12 | q13.13 | Hs.151678 | UDP-N-acetyl-alpha-D- | |
| | | | | | | | | galactosamine:polypeptide N- | |
| | | | | | | | | acetylgalactosaminyltransferase 6 (GalNAc- | |
| | | | | | | | | T6) | |
| 762 | 741 | X81420 | prostate | metastatic | 12 | q13.13 | Hs.32952 | keratin hair basic 1 | |
| 763 | 762 | D79987 | prostate | metastatic | 12 | q13.13 | Hs.153479 | extra spindle poles like 1 (S. cerevisiae) | |
| 764 | 727 | AF025840 | prostate | metastatic | 14 | q21.2 | Hs.99185 | polymerase (DNA directed) epsilon 2 (p59 | |
| | | | | | | | | subunit) | |
| 765 | 744 | AA648933 | prostate | metastatic | 14 | q21.2 | Hs.374811 | hypothetical protein MGC20689 | |
| 766 | 749 | BC006117 | prostate | metastatic | 14 | q21.3 | Hs.222021 | hypothetical protein FLJ12618 | |
| 767 | 750 | AI924794 | prostate | metastatic | 14 | q21.3 | Hs.27931 | hypothetical protein FLJ10607 similar to | |
| | | | | | | | | glucosamine-phosphate N-acetyltransferase | |
| 768 | 776 | AW268365 | prostate | metastatic | 14 | q21.3 | Hs.25740 | ERO1-like (S. cerevisiae) | |
| 769 | 780 | D13633 | prostate | metastatic | 14 | q22.1 | Hs.77695 | Drosophila discs large-1 tumor supressor-like | |
| 770 | 785 | L25876 | prostate | metastatic | 14 | q22.1 | Hs.84113 | cyclin-dependent kinase inhibitor 3 (CDK2- | |
| | | | | | | | | associated dual specificity phosphatase) | |
| 771 | 766 | AI417084 | prostate | metastatic | 14 | q22.2 | Hs.301231 | ESTs Weakly similar to PSA3_HUMAN | |
| | | | | | | | | Proteasome subunit alpha type 3 (Proteasome | |
| | | | | | | | | component C8) (Macropain | |
| 772 | 735 | J04031 | prostate | metastatic | 14 | q23.1 | Hs.172665 | methylenetetrahydrofolate dehydrogenase | |
| | | | | | | | | (NADP+ dependent) methenyltetrahydrofolate | |
| | | | | | | | | cyclohydrolase formyltetrahydrofolate | |
| | | | | | | | | synthetase | |
| 773 | 738 | U65410 | prostate | metastatic | 14 | q23.1 | Hs.79078 | MAD2 mitotic arrest deficient-like 1 (yeast) | |
| 774 | 731 | AA926959 | prostate | metastatic | 14 | q32.12 | Hs.77550 | p53-regulated DDA3 | |
| 775 | 764 | AL080102 | prostate | metastatic | 14 | q32.2 | Hs.334810 | eukaryotic translation initiation factor 5 | |
| 776 | 779 | BF000332 | prostate | metastatic | 14 | q32.2 | Hs.7720 | dynein cytoplasmic heavy polypeptide 1 | |
| 777 | 786 | AI525727 | prostate | metastatic | 14 | q32.2 | Hs.38205 | cyclin-dependent kinase 2-interacting protein | |
| 778 | 800 | AI761729 | prostate | metastatic | 14 | q32.2 | Hs.12908 | CDC42 binding protein kinase beta (DMPK- | |
| | | | | | | | | like) | |
| 779 | 746 | T65554 | prostate | metastatic | 14 | q32.31 | Hs.317821 | hypothetical protein MGC13251 | |
| 780 | 755 | H04885 | prostate | metastatic | 14 | q32.31 | Hs.72363 | Homo sapiens clone MGC: 16771 | |
| | | | | | | | | IMAGE: 3907551 mRNA complete cds | |
| 781 | 797 | AI684508 | prostate | metastatic | 14 | q32.31 | Hs.34045 | cell division cycle associated 4 | |
| 782 | 715 | U81800 | prostate | metastatic | 17 | NULL | Hs.85838 | solute carrier family 16 (monocarboxylic acid | |
| | | | | | | | | transporters) member 3 | |
| 783 | 774 | AI292123 | prostate | metastatic | 17 | NULL | Hs.201390 | ESTs | |
| 784 | 743 | AI458014 | prostate | metastatic | 17 | q22 | Hs.283558 | hypothetical protein PRO1855 | |
| 785 | 775 | AA564822 | prostate | metastatic | 17 | q22 | Hs.298564 | ESTs | |
| 786 | 767 | BG165011 | prostate | metastatic | 17 | q23.2 | Hs.165909 | ESTs Weakly similar to hypothetical protein | |
| | | | | | | | | FLJ20489 [Homo sapiens] [H. sapiens] | |
| 787 | 742 | U28386 | prostate | metastatic | 17 | q24.3 | Hs.159557 | karyopherin alpha 2 (RAG cohort 1 importin | |
| | | | | | | | | alpha 1) | |
| 788 | 713 | K02581 | prostate | metastatic | 17 | q25.3 | Hs.105097 | thymidine kinase 1 soluble | |
| 789 | 719 | AA312511 | prostate | metastatic | 17 | q25.3 | Hs.273307 | signal recognition particle 68 kDa | |
| 790 | 759 | AI525822 | prostate | metastatic | 17 | q25.3 | Hs.109706 | hematological and neurological expressed 1 | |
| 791 | 772 | AI733461 | prostate | metastatic | 18 | p11.22 | Hs.127716 | ESTs | |
| 792 | 783 | AB000277 | prostate | metastatic | 18 | p11.31 | Hs.75814 | discs large (Drosophila) homolog-associated | |
| | | | | | | | | protein 1 | |
| 793 | 712 | X02308 | prostate | metastatic | 18 | p11.32 | Hs.82962 | thymidylate synthetase | |
| 794 | 709 | M91670 | prostate | metastatic | 19 | q13.42 | Hs.174070 | ubiquitin carrier protein | |
| 795 | 708 | AA719022 | prostate | metastatic | 19 | q13.43 | Hs.288549 | ubiquitin UBF-fl | |
| 796 | 792 | AI761506 | prostate | metastatic | 20 | p13 | Hs.274422 | chromosome 20 open reading frame 27 | |
| 797 | 793 | H06350 | prostate | metastatic | 20 | p13 | Hs.135056 | chromosome 20 open reading frame 139 | |
| 798 | 720 | AF011468 | prostate | metastatic | 20 | q13.31 | Hs.250822 | serine/threonine kinase 6 | |
| 799 | 714 | AW016409 | prostate | metastatic | 20 | q13.33 | Hs.235782 | solute carrier family 21 (organic anion | |
| | | | | | | | | transporter) member 12 | |
| 800 | 765 | X70940 | prostate | metastatic | 20 | q13.33 | Hs.2642 | eukaryotic translation elongation factor 1 alpha 2 | |
| 801 | 791 | AI652030 | prostate | metastatic | 21 | q22.11 | Hs.49932 | chromosome 21 open reading frame 45 | |
| 802 | 703 | AI861913 | prostate | metastatic | 21 | q22.3 | Hs.143638 | WD repeat domain 4 | |
| 803 | 757 | AA577678 | prostate | metastatic | 21 | q22.3 | Hs.282961 | Homo sapiens cDNA FLJ35467 fis clone | |
| | | | | | | | | SMINT2005624 | |
| 804 | 781 | AI860822 | prostate | metastatic | 21 | q22.3 | Hs.110757 | DNA segment on chromosome 21 (unique) | |
| | | | | | | | | 2056 expressed sequence | |
| 805 | 790 | AI983544 | prostate | metastatic | 21 | q22.3 | Hs.126522 | chromosome 21 open reading frame 70 | |
| 806 | 120 | R62346 | breast | metastatic | 1 | q23.2 | NULL | unknown | Protein |
| 807 | 120 | R62346 | breast | metastatic | 1 | q23.2 | NULL | unknown | Protein |
| 808 | 120 | R62346 | breast | metastatic | 1 | q23.2 | NULL | unknown | Protein |
| 809 | 120 | R62346 | breast | metastatic | 1 | q23.2 | NULL | unknown | Protein |
| 810 | 120 | R62346 | breast | metastatic | 1 | q23.2 | NULL | unknown | Protein |
| 811 | 120 | R62346 | breast | metastatic | 1 | q23.2 | NULL | unknown | Transcript |
| 812 | 120 | R62346 | breast | metastatic | 1 | q23.2 | NULL | unknown | Transcript |
| 813 | 120 | R62346 | breast | metastatic | 1 | q23.2 | NULL | unknown | Transcript |
| 814 | 120 | R62346 | breast | metastatic | 1 | q23.2 | NULL | unknown | Transcript |
| 815 | 120 | R62346 | breast | metastatic | 1 | q23.2 | NULL | unknown | Transcript |
| 816 | 120 | R62346 | breast | metastatic | 1 | q23.2 | NULL | unknown | Transcript |
| 817 | 120 | R62346 | breast | metastatic | 1 | q23.2 | NULL | unknown | Transcript |
| 818 | 197 | AA663786 | breast | metastatic | 3 | p21.31 | NULL | unknown | Transcript |
| 819 | 194 | AI962335 | breast | metastatic | 3 | p24.3 | Hs.196042 | ESTs | Transcript |
| 820 | 227 | W25552 | breast | metastatic | 9 | q34.3 | Hs.212613 | hypothetical protein FLJ36779 | Protein |
| 821 | 227 | W25552 | breast | metastatic | 9 | q34.3 | Hs.212613 | hypothetical protein FLJ36779 | Transcript |
| 822 | 77 | AI962335 | breast | primary | 3 | p24.3 | Hs.196042 | ESTs | Transcript |
| 823 | 101 | W25552 | breast | primary | 9 | q34.3 | Hs.212613 | hypothetical protein FLJ36779 | Protein |
| 824 | 101 | W25552 | breast | primary | 9 | q34.3 | Hs.212613 | hypothetical protein FLJ36779 | Transcript |
| 825 | 334 | AI962335 | colon | metastatic | 3 | p24.3 | Hs.196042 | ESTs | Transcript |
| 826 | 393 | W25552 | colon | metastatic | 9 | q34.3 | Hs.212613 | hypothetical protein FLJ36779 | Protein |
| 827 | 393 | W25552 | colon | metastatic | 9 | q34.3 | Hs.212613 | hypothetical protein FLJ36779 | Transcript |
| 828 | 301 | AI962335 | colon | primary | 3 | p24.3 | Hs.196042 | ESTs | Transcript |
| 829 | 328 | W25552 | colon | primary | 9 | q34.3 | Hs.212613 | hypothetical protein FLJ36779 | Protein |
| 830 | 328 | W25552 | colon | primary | 9 | q34.3 | Hs.212613 | hypothetical protein FLJ36779 | Transcript |
| 831 | 527 | AK022113 | lung | primary | 1 | p31.3 | Hs.301858 | Homo sapiens cDNA FLJ13017 fis, | Transcript |
| | | | | | | | | clone NT2RP3000628 | |
| 832 | 527 | AK022113 | lung | primary | 1 | p31.3 | Hs.301858 | Homo sapiens cDNA FLJ13017 fis, | Transcript |
| | | | | | | | | clone NT2RP3000628 | |
| 833 | 458 | AA383208 | lung | primary | 5 | p15.1 | Hs.125249 | ESTs | Protein |
| 834 | 458 | AA383208 | lung | primary | 5 | p15.1 | Hs.125249 | ESTs | Transcript |
| 835 | 519 | C00851 | lung | primary | 5 | p13.2 | Hs.144264 | ESTs, Weakly similar to hypothetical | Transcript |
| | | | | | | | | protein FLJ20837 [Homo sapiens] | |
| | | | | | | | | [H. sapiens] | |
| 836 | 505 | AA904882 | lung | primary | 8 | q22.3 | Hs.130107 | ESTs | Transcript |
| 837 | 529 | AK024242 | lung | primary | 8 | q21.11 | Hs.296753 | Homo sapiens cDNA FLJ14180 fis, | Transcript |
| | | | | | | | | clone NT2RP2003799 | |
| 838 | 529 | AK024242 | lung | primary | 8 | q21.11 | Hs.296753 | Homo sapiens cDNA FLJ14180 fis, | Protein |
| | | | | | | | | clone NT2RP2003799 | |
| 839 | 555 | AF232217 | lung | primary | 8 | q13.3 | NULL | unknown | Transcript |
| 840 | 513 | AI146765 | lung | primary | 18 | p11.31 | Hs.373550 | ESTs | Transcript |
| 841 | 753 | N29457 | prostate | metastatic | 1 | q31.1 | Hs.117305 | hypothetical gene supported by | Protein |
| | | | | | | | | BC007071 | |
| 842 | 753 | N29457 | prostate | metastatic | 1 | q31.1 | Hs.117305 | hypothetical gene supported by | Protein |
| | | | | | | | | BC007071 | |
| 843 | 753 | N29457 | prostate | metastatic | 1 | q31.1 | Hs.117305 | hypothetical gene supported by | Protein |
| | | | | | | | | BC007071 | |
| 844 | 753 | N29457 | prostate | metastatic | 1 | q31.1 | Hs.117305 | hypothetical gene supported by | Protein |
| | | | | | | | | BC007071 | |
| 845 | 753 | N29457 | prostate | metastatic | 1 | q31.1 | Hs.117305 | hypothetical gene supported by | Protein |
| | | | | | | | | BC007071 | |
| 846 | 753 | N29457 | prostate | metastatic | 1 | q31.1 | Hs.117305 | hypothetical gene supported by | Transcript |
| | | | | | | | | BC007071 | |
| 847 | 753 | N29457 | prostate | metastatic | 1 | q31.1 | Hs.117305 | hypothetical gene supported by | Transcript |
| | | | | | | | | BC007071 | |
| 848 | 753 | N29457 | prostate | metastatic | 1 | q31.1 | Hs.117305 | hypothetical gene supported by | Protein |
| | | | | | | | | BC007071 | |
| 849 | 753 | N29457 | prostate | metastatic | 1 | q31.1 | Hs.117305 | hypothetical gene supported by | Transcript |
| | | | | | | | | BC007071 | |
| 850 | 753 | N29457 | prostate | metastatic | 1 | q31.1 | Hs.117305 | hypothetical gene supported by | Transcript |
| | | | | | | | | BC007071 | |
| 851 | 753 | N29457 | prostate | metastatic | 1 | q31.1 | Hs.117305 | hypothetical gene supported by | Transcript |
| | | | | | | | | BC007071 | |
| 852 | 753 | N29457 | prostate | metastatic | 1 | q31.1 | Hs.117305 | hypothetical gene supported by | Transcript |
| | | | | | | | | BC007071 | |
| 853 | 753 | N29457 | prostate | metastatic | 1 | q31.1 | Hs.117305 | hypothetical gene supported by | Transcript |
| | | | | | | | | BC007071 | |
| 854 | 753 | N29457 | prostate | metastatic | 1 | q31.1 | Hs.117305 | hypothetical gene supported by | Transcript |
| | | | | | | | | BC007071 | |
| 855 | 705 | AI750154 | prostate | metastatic | 5 | p15.1 | NULL | unknown | Protein |
| 856 | 705 | AI750154 | prostate | metastatic | 5 | p15.1 | NULL | unknown | Transcript |
| 857 | 755 | H04885 | prostate | metastatic | 14 | q32.31 | Hs.72363 | Homo sapiens, clone MGC: 16771 | Protein |
| | | | | | | | | IMAGE: 3907551, mRNA, complete cds | |
| 858 | 755 | H04885 | prostate | metastatic | 14 | q32.31 | Hs.72363 | Homo sapiens, clone MGC: 16771 | Protein |
| | | | | | | | | IMAGE: 3907551, mRNA, complete cds | |
| 859 | 755 | H04885 | prostate | metastatic | 14 | q32.31 | Hs.72363 | Homo sapiens, clone MGC: 16771 | Protein |
| | | | | | | | | IMAGE: 3907551, mRNA, complete cds | |
| 860 | 755 | H04885 | prostate | metastatic | 14 | q32.31 | Hs.72363 | Homo sapiens, clone MGC: 16771 | Protein0 |
| | | | | | | | | IMAGE: 3907551, mRNA, complete cds | |
| 861 | 755 | H04885 | prostate | metastatic | 14 | q32.31 | Hs.72363 | Homo sapiens, clone MGC: 16771 | Protein |
| | | | | | | | | IMAGE: 3907551, mRNA, complete cds | |
| 862 | 755 | H04885 | prostate | metastatic | 14 | q32.31 | Hs.72363 | Homo sapiens, clone MGC: 16771 | Protein |
| | | | | | | | | IMAGE: 3907551, mRNA, complete cds | |
| 863 | 755 | H04885 | prostate | metastatic | 14 | q32.31 | Hs.72363 | Homo sapiens, clone MGC: 16771 | Protein |
| | | | | | | | | IMAGE: 3907551, mRNA, complete cds | |
| 864 | 755 | H04885 | prostate | metastatic | 14 | q32.31 | Hs.72363 | Homo sapiens, clone MGC: 16771 | Protein |
| | | | | | | | | IMAGE: 3907551, mRNA, complete cds | |
| 865 | 755 | H04885 | prostate | metastatic | 14 | q32.31 | Hs.72363 | Homo sapiens, clone MGC: 16771 | Protein |
| | | | | | | | | IMAGE: 3907551, mRNA, complete cds | |
| 866 | 755 | H04885 | prostate | metastatic | 14 | q32.31 | Hs.72363 | Homo sapiens, clone MGC: 16771 | Protein |
| | | | | | | | | IMAGE: 3907551, mRNA, complete cds | |
| 867 | 755 | H04885 | prostate | metastatic | 14 | q32.31 | Hs.72363 | Homo sapiens, clone MGC: 16771 | Protein |
| | | | | | | | | IMAGE: 3907551, mRNA, complete cds | |
| 868 | 755 | H04885 | prostate | metastatic | 14 | q32.31 | Hs.72363 | Homo sapiens, clone MGC: 16771 | Protein |
| | | | | | | | | IMAGE: 3907551, mRNA, complete cds | |
| 869 | 755 | H04885 | prostate | metastatic | 14 | q32.31 | Hs.72363 | Homo sapiens, clone MGC: 16771 | Protein |
| | | | | | | | | IMAGE: 3907551, mRNA, complete cds | |
| 870 | 755 | H04885 | prostate | metastatic | 14 | q32.31 | Hs.72363 | Homo sapiens, clone MGC: 16771 | Protein |
| | | | | | | | | IMAGE: 3907551, mRNA, complete cds | |
| 871 | 755 | H04885 | prostate | metastatic | 14 | q32.31 | Hs.72363 | Homo sapiens, clone MGC: 16771 | Protein0 |
| | | | | | | | | IMAGE: 3907551, mRNA, complete cds | |
| 872 | 755 | H04885 | prostate | metastatic | 14 | q32.31 | Hs.72363 | Homo sapiens, clone MGC: 16771 | Protein |
| | | | | | | | | IMAGE: 3907551, mRNA, complete cds | |
| 873 | 755 | H04885 | prostate | metastatic | 14 | q32.31 | Hs.72363 | Homo sapiens, clone MGC: 16771 | Protein |
| | | | | | | | | IMAGE: 3907551, mRNA, complete cds | |
| 874 | 755 | H04885 | prostate | metastatic | 14 | q32.31 | Hs.72363 | Homo sapiens, clone MGC: 16771 | Protein |
| | | | | | | | | IMAGE: 3907551, mRNA, complete cds | |
| 875 | 755 | H04885 | prostate | metastatic | 14 | q32.31 | Hs.72363 | Homo sapiens, clone MGC: 16771 | Protein |
| | | | | | | | | IMAGE: 3907551, mRNA, complete cds | |
| 876 | 755 | H04885 | prostate | metastatic | 14 | q32.31 | Hs.72363 | Homo sapiens, clone MGC: 16771 | Protein |
| | | | | | | | | IMAGE: 3907551, mRNA, complete cds | |
| 877 | 755 | H04885 | prostate | metastatic | 14 | q32.31 | Hs.72363 | Homo sapiens, clone MGC: 16771 | Protein |
| | | | | | | | | IMAGE: 3907551, mRNA, complete cds | |
| 878 | 755 | H04885 | prostate | metastatic | 14 | q32.31 | Hs.72363 | Homo sapiens, clone MGC: 16771 | Protein |
| | | | | | | | | IMAGE: 3907551, mRNA, complete cds | |
| 879 | 755 | H04885 | prostate | metastatic | 14 | q32.31 | Hs.72363 | Homo sapiens, clone MGC: 16771 | Protein |
| | | | | | | | | IMAGE: 3907551, mRNA, complete cds | |
| 880 | 755 | H04885 | prostate | metastatic | 14 | q32.31 | Hs.72363 | Homo sapiens, clone MGC: 16771 | Protein |
| | | | | | | | | IMAGE: 3907551, mRNA, complete cds | |
| 881 | 755 | H04885 | prostate | metastatic | 14 | q32.31 | Hs.72363 | Homo sapiens, clone MGC: 16771 | Protein |
| | | | | | | | | IMAGE: 3907551, mRNA, complete cds | |
| 882 | 755 | H04885 | prostate | metastatic | 14 | q32.31 | Hs.72363 | Homo sapiens, clone MGC: 16771 | Protein |
| | | | | | | | | IMAGE: 3907551, mRNA, complete cds | |
| 883 | 755 | H04885 | prostate | metastatic | 14 | q32.31 | Hs.72363 | Homo sapiens, clone MGC: 16771 | Protein |
| | | | | | | | | IMAGE: 3907551, mRNA, complete cds | |
| 884 | 755 | H04885 | prostate | metastatic | 14 | q32.31 | Hs.72363 | Homo sapiens, clone MGC: 16771 | Protein |
| | | | | | | | | IMAGE: 3907551, mRNA, complete cds | |
| 885 | 755 | H04885 | prostate | metastatic | 14 | q32.31 | Hs.72363 | Homo sapiens, clone MGC: 16771 | Transcript |
| | | | | | | | | IMAGE: 3907551, mRNA, complete cds | |
| 886 | 755 | H04885 | prostate | metastatic | 14 | q32.31 | Hs.72363 | Homo sapiens, clone MGC: 16771 | Protein |
| | | | | | | | | IMAGE: 3907551, mRNA, complete cds | |
| 887 | 755 | H04885 | prostate | metastatic | 14 | q32.31 | Hs.72363 | Homo sapiens, clone MGC: 16771 | Protein |
| | | | | | | | | IMAGE: 3907551, mRNA, complete cds | |
| 888 | 755 | H04885 | prostate | metastatic | 14 | q32.31 | Hs.72363 | Homo sapiens, clone MGC: 16771 | Transcript |
| | | | | | | | | IMAGE: 3907551, mRNA, complete cds | |
| 889 | 755 | H04885 | prostate | metastatic | 14 | q32.31 | Hs.72363 | Homo sapiens, clone MGC: 16771 | Protein |
| | | | | | | | | IMAGE: 3907551, mRNA, complete cds | |
| 890 | 755 | H04885 | prostate | metastatic | 14 | q32.31 | Hs.72363 | Homo sapiens, clone MGC: 16771 | Transcript |
| | | | | | | | | IMAGE: 3907551, mRNA, complete cds | |
| 891 | 755 | H04885 | prostate | metastatic | 14 | q32.31 | Hs.72363 | Homo sapiens, clone MGC: 16771 | Transcript |
| | | | | | | | | IMAGE: 3907551, mRNA, complete cds | |
| 892 | 755 | H04885 | prostate | metastatic | 14 | q32.31 | Hs.72363 | Homo sapiens, clone MGC: 16771 | Transcript |
| | | | | | | | | IMAGE: 3907551, mRNA, complete cds | |
| 893 | 755 | H04885 | prostate | metastatic | 14 | q32.31 | Hs.72363 | Homo sapiens, clone MGC: 16771 | Transcript |
| | | | | | | | | IMAGE: 3907551, mRNA, complete cds | |
| 894 | 755 | H04885 | prostate | metastatic | 14 | q32.31 | Hs.72363 | Homo sapiens, clone MGC: 16771 | Transcript |
| | | | | | | | | IMAGE: 3907551, mRNA, complete cds | |
| 895 | 755 | H04885 | prostate | metastatic | 14 | q32.31 | Hs.72363 | Homo sapiens, clone MGC: 16771 | Transcript |
| | | | | | | | | IMAGE: 3907551, mRNA, complete cds | |
| 896 | 755 | H04885 | prostate | metastatic | 14 | q32.31 | Hs.72363 | Homo sapiens, clone MGC: 16771 | Transcript |
| | | | | | | | | IMAGE: 3907551, mRNA, complete cds | |
| 897 | 755 | H04885 | prostate | metastatic | 14 | q32.31 | Hs.72363 | Homo sapiens, clone MGC: 16771 | Transcript |
| | | | | | | | | IMAGE: 3907551, mRNA, complete cds | |
| 898 | 755 | H04885 | prostate | metastatic | 14 | q32.31 | Hs.72363 | Homo sapiens, clone MGC: 16771 | Transcript |
| | | | | | | | | IMAGE: 3907551, mRNA, complete cds | |
| 899 | 755 | H04885 | prostate | metastatic | 14 | q32.31 | Hs.72363 | Homo sapiens, clone MGC: 16771 | Transcript |
| | | | | | | | | IMAGE: 3907551, mRNA, complete cds | |
| 900 | 755 | H04885 | prostate | metastatic | 14 | q32.31 | Hs.72363 | Homo sapiens, clone MGC: 16771 | Transcript |
| | | | | | | | | IMAGE: 3907551, mRNA, complete cds | |
| 901 | 755 | H04885 | prostate | metastatic | 14 | q32.31 | Hs.72363 | Homo sapiens, clone MGC: 16771 | Transcript |
| | | | | | | | | IMAGE: 3907551, mRNA, complete cds | |
| 902 | 755 | H04885 | prostate | metastatic | 14 | q32.31 | Hs.72363 | Homo sapiens, clone MGC: 16771 | Transcript |
| | | | | | | | | IMAGE: 3907551, mRNA, complete cds | |
| 903 | 755 | H04885 | prostate | metastatic | 14 | q32.31 | Hs.72363 | Homo sapiens, clone MGC: 16771 | Transcript |
| | | | | | | | | IMAGE: 3907551, mRNA, complete cds | |
| 904 | 755 | H04885 | prostate | metastatic | 14 | q32.31 | Hs.72363 | Homo sapiens, clone MGC: 16771 | Transcript |
| | | | | | | | | IMAGE: 3907551, mRNA, complete cds | |
| 905 | 755 | H04885 | prostate | metastatic | 14 | q32.31 | Hs.72363 | Homo sapiens, clone MGC: 16771 | Transcript |
| | | | | | | | | IMAGE: 3907551, mRNA, complete cds | |
| 906 | 755 | H04885 | prostate | metastatic | 14 | q32.31 | Hs.72363 | Homo sapiens, clone MGC: 16771 | Transcript |
| | | | | | | | | IMAGE: 3907551, mRNA, complete cds | |
| 907 | 755 | H04885 | prostate | metastatic | 14 | q32.31 | Hs.72363 | Homo sapiens, clone MGC: 16771 | Transcript |
| | | | | | | | | IMAGE: 3907551, mRNA, complete cds | |
| 908 | 755 | H04885 | prostate | metastatic | 14 | q32.31 | Hs.72363 | Homo sapiens, clone MGC: 16771 | Transcript |
| | | | | | | | | IMAGE: 3907551, mRNA, complete cds | |
| 909 | 755 | H04885 | prostate | metastatic | 14 | q32.31 | Hs.72363 | Homo sapiens, clone MGC: 16771 | Transcript |
| | | | | | | | | IMAGE: 3907551, mRNA, complete cds | |
| 910 | 755 | H04885 | prostate | metastatic | 14 | q32.31 | Hs.72363 | Homo sapiens, clone MGC: 16771 | Transcript |
| | | | | | | | | IMAGE: 3907551, mRNA, complete cds | |
| 911 | 755 | H04885 | prostate | metastatic | 14 | q32.31 | Hs.72363 | Homo sapiens, clone MGC: 16771 | Transcript |
| | | | | | | | | IMAGE: 3907551, mRNA, complete cds | |
| 912 | 755 | H04885 | prostate | metastatic | 14 | q32.31 | Hs.72363 | Homo sapiens, clone MGC: 16771 | Transcript |
| | | | | | | | | IMAGE: 3907551, mRNA, complete cds | |
| 913 | 755 | H04885 | prostate | metastatic | 14 | q32.31 | Hs.72363 | Homo sapiens, clone MGC: 16771 | Transcript |
| | | | | | | | | IMAGE: 3907551, mRNA, complete cds | |
| 914 | 755 | H04885 | prostate | metastatic | 14 | q32.31 | Hs.72363 | Homo sapiens, clone MGC: 16771 | Transcript |
| | | | | | | | | IMAGE: 3907551, mRNA, complete cds | |
| 915 | 755 | H04885 | prostate | metastatic | 14 | q32.31 | Hs.72363 | Homo sapiens, clone MGC: 16771 | Transcript |
| | | | | | | | | IMAGE: 3907551, mRNA, complete cds | |
| 916 | 755 | H04885 | prostate | metastatic | 14 | q32.31 | Hs.72363 | Homo sapiens, clone MGC: 16771 | Transcript |
| | | | | | | | | IMAGE: 3907551, mRNA, complete cds | |
| 917 | 755 | H04885 | prostate | metastatic | 14 | q32.31 | Hs.72363 | Homo sapiens, clone MGC: 16771 | Transcript |
| | | | | | | | | IMAGE: 3907551, mRNA, complete cds | |
| 918 | 755 | H04885 | prostate | metastatic | 14 | q32.31 | Hs.72363 | Homo sapiens, clone MGC: 16771 | Transcript |
| | | | | | | | | IMAGE: 3907551, mRNA, complete cds | |
| 919 | 755 | H04885 | prostate | metastatic | 14 | q32.31 | Hs.72363 | Homo sapiens, clone MGC: 16771 | Transcript |
| | | | | | | | | IMAGE: 3907551, mRNA, complete cds | |
| 920 | 755 | H04885 | prostate | metastatic | 14 | q32.31 | Hs.72363 | Homo sapiens, clone MGC: 16771 | Transcript |
| | | | | | | | | IMAGE: 3907551, mRNA, complete cds | |
| 921 | 755 | H04885 | prostate | metastatic | 14 | q32.31 | Hs.72363 | Homo sapiens, clone MGC: 16771 | Transcript |
| | | | | | | | | IMAGE: 3907551, mRNA, complete cds | |
| 922 | 755 | H04885 | prostate | metastatic | 14 | q32.31 | Hs.72363 | Homo sapiens, clone MGC: 16771 | Transcript |
| | | | | | | | | IMAGE: 3907551, mRNA, complete cds | |
| 923 | 755 | H04885 | prostate | metastatic | 14 | q32.31 | Hs.72363 | Homo sapiens, clone MGC: 16771 | Transcript |
| | | | | | | | | IMAGE: 3907551, mRNA, complete cds | |

The application's sequence listing, which the Patent Office published only in electronic form, follows.

SEQUENCE LISTING (923 sequences)

SEQ ID NO: 1 - DNA, 267 bp, Homo sapiens
gtgttttttaccttggatttaaagtcaccttaggttggggcaacagattctcactcatgtttaagatcttgttatttcagcttcataagatcaaagaggagtctttcccttttctcttttaccctcaggattctcatcccttacagctgactcttccaggcaatttccatagatctgcagtcctgcctctgccacagtctctctgttgtccccacatctacccaacttcctgtactgttgcccttctgtcgtcttctcgcagccgta

SEQ ID NO: 2 - DNA, 1686 bp, Homo sapiens
ccacgcgtccgggcgtaagccaggcgtgttaaagccggtcggaactgctccggagggcacgggctccgtaggcaccaactgcaaggacccctccccctgcgggcgctcccatggcacagttcgcgttcgagagtgacctgcactcgctgcttcagctggatgcacccatccccaatgcaccccctgcgcgctggcagcgcaaagccaaggaagccgcaggcccggccccctcacccatgcgggccgccaaccgatcccacagcgccggcaggactccgggccgaactcctggcaaatccagttccaaggttcagaccactcctagcaaacctggcggtgaccgctatatcccccatcgcagtgctgcccagatggaggtggccagcttcctcctgagcaaggagaaccagtctgaaaacagccagacgcccaccaagaaggaacatcagaaagcctgggctttgaacctgaacggttttgatgtagaggaagccaagatccttcggctcagtggaaaaccacaaaatgcgccagagggttatcagaacagactgaaagtactctacagccaaaaggccactcctggctccagccggaagacctgccgttacattccttccctgccagaccgtatcctggatgcgcctgaaatccgaaatgactattacctgaaccttgtggattggagttctgggaatgtactggccgtggcactggacaacagtgtgtacctgtggagtgcaagctctggtgacatcctgcagcttttgcaaatggagcagcctggggaatatatatcctctgtggcctggatcaaagagggcaactacttggctgtgggcaccagcagtgctgaggtgcagctatgggatgtgcagcagcagaaacggcttcgaaatatgaccagtcactctgcccgagtgggctccctaagctggaacagctatatcctgtccagtggttcacgttctggccacatccaccaccatgatgttcgggtagcagaacaccatgtggccacactgagtggccacagccaggaagtgtgtgggctgcgctgggccccagatggacgacatttggccagtggtggtaatgataacttggtcaatgtgtggcctagtgctcctggagagggtggctgggttcctctgcagacattcacccagcatcaaggggctgtcaaggccgtagcatggtgtccctggcagtccaatgtcctggcaacaggagggggcaccagtgatcgacacattcgcatctggaatgtgtgctctggggcctgtctgagtgccgtggatgcccattcccaggtgtgctccatcctctggtctccccattacaaggagctcatctcaggccatggctttgcacagaaccagctagttatttggaagtacccaaccatggccaaggtggctgaactcaaaggtcacacatcccgggtcctgagtctgaccatgagcccagatggggccacagtggcatccgcagcagcagatgagaccctgaggctatggcgctgttttgagttggaccctgcgcggcggcgggagcgggagaaggccagtgcagccaaaagcagcctcatccaccaaggcatccgctgaagaccaacccatcacctcagttgttttttatttttctaataaagtcatgtctcccttcatgtttttttttttaaaa

SEQ ID NO: 3 - DNA, 2384 bp, Homo sapiens
gaacctctactttgactgttcaagaccaagaggagttgtgtaatgggaaatgcaagtcaaaacagctttgtaggtctcagagtttgcttttaagaagtagtacaagaaggaatagttatatcaatacaccagtggctgaaattatcatgaaaccaaatgttggacaaggcagcacaagtgtgcaaacagctatggaaagtgaactcggagagtctagtgccacaatcaataaaagactctgcaaaagtacaatagaactttcagaaaattctttacttccagcttcttctatgttgactggcacacaaagcttgctgcaacctcatttagagagggttgccatcgatgctctacagttatgttgtttgttacttcccccaccaaatcgtagaaagcttcaacttttaatgcgtatgatttcccgaatgagtcaaaatgttgatatgcccaaacttcatgatgcaatgggtacgaggtcactgatgatacataccttttctcgatgtgtgttatgctgtgctgaagaagtggatcttgatgagcttcttgctggaagattagtttctttcttaatggatcatcatcaggaaattcttcaagtaccctcttacttacagactgcagtggaaaaacatcttgactacttaaaaaagggacatattgaaaatcctggagatggactatttgctcctttgccaacttacccatactgtaagcagattagtgctcaggagtttgatgagcaaaaagtttctacctctcaagctgcaattgcagaacttttagaaaatattattaaaaacaggagtttacctctaaaggagaaaagaaaaaaactaaaacagtttcagaaggaatatcctttgatatatcagaaaagatttccaaccacggagagtgaagcagcactttttggtgacaaacctacaatcaagcaaccaatgctgattttaagaaaaccaaagttccgtagtctaagataactaactgaattaaaaattatgtaatacttgtggaactttgataaatgaagccatatctgagaatgtagctactcaaaaggaagtctgtcattaataaggtatttctaaataaacacattatgtaaggaagtgccaaaatagttatcaatgtgagactcttaggaaactaactagatctcaattgagagcacataacaatagatgataccaaatactttttgtttttaacacagctatccagtaaggctatcatgatgtgtgctaaaattttatttacttgaattttgaaaactgagctgtgttagggattaaactataattctgttcttaaaagaaaatttatctgcaaatgtgcaagttctgagatattagctaatgaattagttgtttggggttacttctttgtttctaagtataagaatgtgaagaatatttgaaaactcaatgaaataattctcagctgccaaatgttgcactcttttatatattctttttccacttttgatctatttatatatatgtatgtgtttttaaaatatgtgtatattttatcagatttggttttgccttaaatattatccccaattgcttcagtcattcatttgttcagtatatatattttgaattctagttttcataatctattagaagatggggatataaaagaagtataaggcaatcatatattcattcaaaagatatttatttagcaactgctatgtgcctttcgttgttccagatatgcagagacaatgataaataaaacatataatctcttccataaggtatttattttttaatcaagggagatacacctatcagatgtttaaaataacaacactacccactgaaatcagggcatatagaatcattcagctaaagagtgacttctatgatgatggaacaggtctctaagctagtggttttcaaactggtacacattagactcacccgaggaattttaaaacagcctatatgcccagggcctaacttacactaattaaatctgaattttggggatgttgtatagggattagtattttttttaatctaggtgattccaatattcagccaactgtgagaatcaatggcctaaatgctttttataaacatttttataagtgtcaagataatggcacattgactttattttttcattggaagaaaatgcctgccaagtataaatgactctcatcttaaaacaaggttcttcaggtttctgcttgattgacttggtacaaacttgaagcaagttgccttctaatttttactccaagattgtttcatatctattccttaagtgtaaagaaatatataatgcatggtttgtaataaaatcttaatgtttaatgactgaaaaaaaaaaaaaaaaaaaaaaaaaaaaaaaaaaaaaaaaaaaaa

SEQ ID NO: 4 - DNA, 648 bp, Homo sapiens
gtggagcagtgaactgtgtgtggttccttctacttggggatcatgcagagagcttcgcgtctgaagagagagctgcacatgttagccacagagccacccccaggcatcacatgttggcaagataaagaccaaatggatgacctgcgagctcaaatattaggtggagccaacacaccttatgagaaaggtgtttttaagctagaagttatcattcctgagaggtacccatttgaacctcctcagatccgatttctcactccaatttatcatccaaacattgattctgctggaaggatttgtctggatgttctcaaattgccaccaaaaggtgcttggagaccatccctcaacatcgcaactgtgttgacctctattcagctgctcatgtcagaacccaaccctgatgacccgctcatggctgacatatcctcagaatttaaatataataagccagccttcctcaagaatgccagacagtggacagagaagcatgcaagacagaaacaaaaggctgatgaggaagagatgcttgataatctaccagaggctggtgactccagagtacacaactcaacacagaaaaggaaggccagtcagctagtaggcatagaaaagaaatttcatcctgatgtttaggggacttgtcct

SEQ ID NO: 5 - DNA, 2740 bp, Homo sapiens
gcgaaattgaggtttcttggtattgcgcgtttctcttccttgctgactctccgaatggccatggactcgtcgcttcaggcccgcctgtttcccggtctcgctatcaagatccaacgcagtaatggtttaattcacagtgccaatgtaaggactgtgaacttggagaaatcctgtgtttcagtggaatgggcagaaggaggtgccacaaagggcaaagagattgattttgatgatgtggctgcaataaacccagaactcttacagcttcttcccttacatccgaaggacaatctgcccttgcaggaaaatgtaacaatccagaaacaaaaacggagatccgtcaactccaaaattcctgctccaaaagaaagtcttcgaagccgctccactcgcatgtccactgtctcagagcttcgcatcacggctcaggagaatgacatggaggtggagctgcctgcagctgcaaactcccgcaagcagttttcagttcctcctgcccccactaggccttcctgccctgcagtggctgaaataccattgaggatggtcagcgaggagatggaagagcaagtccattccatccgtggcagctcttctgcaaaccctgtgaactcagttcggaggaaatcatgtcttgtgaaggaagtggaaaaaatgaagaacaagcgagaagagaagaaggcccagaactctgaaatgagaatgaagagagctcaggagtatgacagtagttttccaaactgggaatttgcccgaatgattaaagaatttcgggctactttggaatgtcatccacttactatgactgatcctatcgaagagcacagaatatgtgtctgtgttaggaaacgcccactgaataagcaagaattggccaagaaagaaattgatgtgatttccattcctagcaagtgtctcctcttggtacatgaacccaagttgaaagtggacttaacaaagtatctggagaaccaagcattctgctttgactttgcatttgatgaaacagcttcgaatgaagttgtctacaggttcacagcaaggccactggtacagacaatctttgaaggtggaaaagcaacttgttttgcatatggccagacaggaagtggcaagacacatactatgggcggagacctctctgggaaagcccagaatgcatccaaagggatctatgccatggcctcccgggacgtcttcctcctgaagaatcaaccctgctaccggaagttgggcctggaagtctatgtgacattcttcgagatctacaatgggaagctgtttgacctgctcaacaagaaggccaagctgcgcgtgctggaggacggcaagcaacaggtgcaagtggtggggctgcaggagcatctggttaactctgctgatgatgtcatcaagatgctcgacatgggcagcgcctgcagaacctctgggcagacatttgccaactccaattcctcccgctcccacgcgtgcttccaaattattcttcgagctaaagggagaatgcatggcaagttctctttggtagatctggcagggaatgagcgaggcgcagacacttccagtgctgaccggcagacccgcatggagggcgcagaaatcaacaagagtctcttagccctgaaggagtgcatcagggccctgggacagaacaaggctcacaccccgttccgtgagagcaagctgacacaggtgctgagggactccttcattggggagaactctaggacttgcatgattgccacgatctcaccaggcataagctcctgtgaatatactttaaacaccctgagatatgcagacagggtcaaggagctgagcccccacagtgggcccagtggagagcagttgattcaaatggaaacagaagagatggaagcctgctctaacggggcgctgattccaggcaatttatccaaggaagaggaggaactgtcttcccagatgtccagctttaacgaagccatgactcagatcagggagctggaggagaaggctatggaagagctcaaggagatcatacagcaaggaccagactggcttgagctctctgagatgaccgagcagccagactatgacctggagacctttgtgaacaaagcggaatctgctctggcccagcaagccaagcatttctcagccctgcgagatgtcatcaaggccttacgcctggccatgcagctggaagagcaggctagcagacaaataagcagcaagaaacggccccagtgacgactgcaaataaaaatctgtttggtttgacacccagcctcttccctggccctccccagagaactttgggtacctggtgggtctaggcagggtctgagctgggacaggttctggtaaatgccaagtatgggggcatctgggcccagggcagctggggagggggtcagagtgacatgggacactccttttctgttcctcagttgtcgccctcacgagaggaaggagctcttagttacccttttgtgttgcccttctttccatcaaggggaatgttctcagcatagagctttctccgcagcatcctgcctgcgtggactggctgctaatggagagctccctggggttgtcctggctctggggagagagacggagcctttagtacagctatctgctggctctaaaccttctacgcctttgggccgagcactgaatgtcttgtactttaaaaaaatgtttctgagacctctttctactttactgtctccctagagtcctagaggatccctac

SEQ ID NO: 6 - DNA, 10211 bp, Homo sapiens
gagaggtcgttttcccgtccccgagagcaagtttatttacaaatgttggagtaataaagaaggcagaacaaaatgagctgggctttggaagaatggaaagaagggctgcctacaagagctcttcagaaaattcaagagcttgaaggacagcttgacaaactgaagaaggaaaagcagcaaaggcagtttcagcttgacagtctcgaggctgcgcctcagaagcaaacacagaaggttgaaaatgaaaaaaccgagggtacaaacctgaaaagggagaatcaaagattgatggaaatatgtgaaagtctggagaaaactaagcagaagatttctcatgaacttcaagtcaaggagtcacaagtgaatttccaggaaggacaactgaattcaggcaaaaaacaaatagaaaaactggaacaggaacttaaaaggtgtaaatctgagcttgaaagaagccaacaagctgcgcagtctgcagatgtctctctgaatccatgcaatacaccacaaaaaatttttacaactccactaacaccaagtcaatattatagtggttccaagtatgaagatctaaaagaaaaatataataaagaggttgaagaacgaaaaagattagaggcagaggttaaagccttgcaggctaaaaaagcaagccagactcttccacaagccaccatgaatcaccgcgacattgcccggcatcaggcttcatcatctgtgttctcatggcagcaagagaagaccccaagtcatctttcatctaattctcaaagaactccaattaggagagatttctctgcatcttacttttctggggaacaagaggtgactccaagtcgatcaactttgcaaatagggaaaagagatgctaatagcagtttctttgacaattctagcagtcctcatcttttggatcaattaaaagcgcagaatcaagagctaagaaacaagattaatgagttggaactacgcctgcaaggacatgaaaaagaaatgaaaggccaagtgaataagtttcaagaactccaactccaactggagaaagcaaaagtggaattaattgaaaaagagaaagttttgaacaaatgtagggatgaactagtgagaacaacagcacaatacgaccaggcgtcaaccaagtatactgcattggaacaaaaactgaaaaaattgacggaagatttgagttgtcagcgacaaaatgcagaaagtgccagatgttctctggaacagaaaattaaggaaaaagaaaaggagtttcaagaggagctctcccgtcaacagcgttctttccaaacactggaccaggagtgcatccagatgaaggccagactcacccaggagttacagcaagccaagaatatgcacaacgtcctgcaggctgaactggataaactcacatcagtaaagcaacagctagaaaacaatttggaagagtttaagcaaaagttgtgcagagctgaacaggcgttccaggcgagtcagatcaaggagaatgagctgaggagaagcatggaggaaatgaagaaggaaaacaacctccttaagagtcactctgagcaaaaggccagagaagtctgccacctggaggcagaactcaagaacatcaaacagtgtttaaatcagagccagaattttgcagaagaaatgaaagcgaagaatacctctcaggaaaccatgttaagagatcttcaagaaaaaataaatcagcaagaaaactccttgactttagaaaaactgaagcttgctgtggctgatctggaaaagcagcgagattgttctcaagaccttttgaagaaaagagaacatcacattgaacaacttaatgataagttaagcaagacagagaaagagtccaaagccttgctgagtgctttagagttaaaaaagaaagaatatgaattgaaagaagagaaaactctgttttcttgttggaaaagtgaaaacgaaaaacttttaactcagatggaatcagaaaaggaaaacttgcagagtaaaattaatcacttggaaacttgtctgaagacacagcaaataaaaagtcatgaatacaacgagagagtaagaacgctggagatggacagagaaaacctaagtgtcgagatcagaaaccttcacaacgtgttagacagtaagtcagtggaggtagagacccagaaactagcttatatggagctacagcagaaagctgagttctcagatcagaaacatcagaaggaaatagaaaatatgtgtttgaagacttctcagcttactgggcaagttgaagatctagaacacaagcttcagttactgtcaaatgaaataatggacaaagaccggtgttaccaagacttgcatgccgaatatgagagcctcagggatctgctaaaatccaaagatgcttctctggtgacaaatgaagatcatcagagaagtcttttggcttttgatcagcagcctgccatgcatcattcctttgcaaatataattggagaacaaggaagcatgccttcagagaggagtgaatgtcgtttagaagcagaccaaagtccgaaaaattctgccatcctacaaaatagagttgattcacttgaattttcattagagtctcaaaaacagatgaactcagacctgcaaaagcagtgtgaagagttggtgcaaatcaaaggagaaatagaagaaaatctcatgaaagcagaacagatgcatcaaagttttgtggctgaaacaagtcagcgcattagtaagttacaggaagacacttctgctcaccagaatgttgttgctgaaaccttaagtgcccttgagaacaaggaaaaagagctgcaacttttaaatgataaggtagaaactgagcaggcagagattcaagaattaaaaaagagcaaccatctacttgaagactctctaaaggagctacaacttttatccgaaaccctaagcttggagaagaaagaaatgagttccatcatttctctaaataaaagggaaattgaagagctgacccaagagaatgggactcttaaggaaattaatgcatccttaaatcaagagaagatgaacttaatccagaaaagtgagagttttgcaaactatatagatgaaagggagaaaagcatttcagagttatctgatcagtacaagcaagaaaaacttattttactacaaagatgtgaagaaaccggaaatgcatatgaggatcttagtcaaaaatacaaagcagcacaggaaaagaattctaaattagaatgcttgctaaatgaatgcactagtctttgtgaaaataggaaaaatgagttggaacagctaaaggaagcatttgcaaaggaacaccaagaattcttaacaaaattagcatttgctgaagaaagaaatcagaatctgatgctagagttggagacagtgcagcaagctctgagatctgagatgacagataaccaaaacaattctaagagcgaggctggtggtttaaagcaagaaatcatgactttaaaggaagaacaaaacaaaatgcaaaaggaagttaatgacttattacaagagaatgaacagctgatgaaggtaatgaagactaaacatgaatgtcaaaatctagaatcagaaccaattaggaactctgtgaaagaaagagagagtgagagaaatcaatgtaattttaaacctcagatggatcttgaagttaaagaaatttctctagatagttataatgcgcagttggtgcaattagaagctatgctaagaaataaggaattaaaacttcaggaaagtgagaaggagaaggagtgcctgcagcatgaattacagacaattagaggagatcttgaaaccagcaatttgcaagacatgcagtcacaagaaattagtggccttaaagactgtgaaatagatgcggaagaaaagtatatttcagggcctcatgagttgtcaacaagtcaaaacgacaatgcacaccttcagtgctctctgcaaacaacaatgaacaagctgaatgagctagagaaaatatgtgaaatactgcaggctgaaaagtatgaactcgtaactgagctgaatgattcaaggtcagaatgtatcacagcaactaggaaaatggcagaagaggtagggaaactactaaatgaagttaaaatattaaatgatgacagtggtcttctccatggtgagttagtggaagacataccaggaggtgaatttggtgaacaaccaaatgaacagcaccctgtgtctttggctccattggacgagagtaattcctacgagcacttgacattgtcagacaaagaagttcaaatgcactttgccgaattgcaagagaaattcttatctttacaaagtgaacacaaaattttacatgatcagcactgtcagatgagctctaaaatgtcagagctgcagacctatgttgactcattaaaggccgaaaatttggtcttgtcaacgaatctgagaaactttcaaggtgacttggtgaaggagatgcagctgggcttggaggaggggctcgttccatccctgtcatcctcttgtgtgcctgacagctctagtcttagcagtttgggagactcctccttttacagagctcttttagaacagacaggagatatgtctcttttgagtaatttagaaggggctgtttcagcaaaccagtgcagtgtagatgaagtattttgcagcagtctgcaggaggagaatctgaccaggaaagaaaccccttcggccccagcgaagggtgttgaagagcttgagtccctctgtgaggtgtaccggcagtccctcgagaagctagaagagaaaatggaaagtcaagggattatgaaaaataaggaaattcaagagctcgagcagttattaagttctgaaaggcaagagcttgactgccttaggaagcagtatttgtcagaaaatgaacagtggcaacagaagctgacaagcgtgactctggagatggagtccaagttggcggcagaaaagaaacagacggaacaactgtcacttgagctggaagtagcacgactccagctacaaggtctggacttaagttctcggtctttgcttggcatcgacacagaagatgctattcaaggccgaaatgagagctgtgacatatcaaaagaacatacttcagaaactacagaaagaacaccaaagcatgatgttcatcagatttgtgataaagatgctcagcaggacctcaatctagacattgagaaaataactgagactggtgcattgaaacccacaggagagtgctctggggaacagtccccagataccaattatgagcctccaggggaagataaaacccagggctcttcagaatgcatttctgaattgtcattttctggtcctaatgctttggtacctatggatttcctggggaatcaggaagatatccataatcttcaactgcgggtaaaagagacatcaaatgagaatttgagattacttcatgtgatagaggaccgtgacagaaaagttgaaagtttgctaaatgaaatgaaagaattagactcaaaactccatttacaggaggtacaactaatgaccaaaattgaagcatgcatagaattggaaaaaatagttggggaacttaagaaagaaaactcagatttaagtgaaaaattggaatatttttcttgtgatcaccaggagttactccagagagtagaaacttctgaaggcctcaattctgatttagaaatgcatgcagataaatcatcacgtgaagatattggagataatgtggccaaggtgaatgacagctggaaggagagatttcttgatgtggaaaatgagctgagtaggatcagatcggagaaagctagcattgagcatgaagccctctacctggaggctgacttagaggtagttcaaacagagaagctatgtttagaaaaagacaatgaaaataagcagaaggttattgtctgccttgaagaagaactctcagtggtcacaagtgagagaaaccagcttcgtggagaattagatactatgtcaaaaaaaaccacggcactggatcagttgtctgaaaaaatgaaggagaaaacacaagagcttgagtctcatcaaagtgagtgtctccattgcattcaggtggcagaggcagaggtgaaggaaaagacggaactccttcagactttgtcctctgatgtgagtgagctgttaaaagacaaaactcatctccaggaaaagctgcagagtttggaaaaggactcacaggcactgtctttgacaaaatgtgagctggaaaaccaaattgcacaactgaataaagagaaagaattgcttgtcaaggaatctgaaagcctgcaggccagactgagtgaatcagattatgaaaagctgaatgtctccaaggccttggaggccgcactggtggagaaaggtgagttcgcattgaggctgagctcaacacaggaggaagtgcatcagctgagaagaggcatcgagaaactgagagttcgcattgaggccgatgaaaagaagcagctgcacatcgcagagaaactgaaagaacgcgagcgggagaatgattcacttaaggataaagttgagaaccttgaaagggaattgcagatgtcagaagaaaaccaggagctagtgattcttgatgccgagaattccaaagcagaagtagagactctaaaaacacaaatagaagagatggccagaagcctgaaagtttttgaattagaccttgtcacgttaaggtctgaaaaagaaaatctgacaaaacaaatacaagaaaaacaaggtcagttgtcagaactagacaagttactctcttcatttaaaagtctgttagaagaaaaggagcaagcagagatacagatcaaagaagaatctaaaactgcagtggagatgcttcagaatcagttaaaggagctaaatgaggcagtagcagccttgtgtggtgaccaagaaattatgaaggccacagaacagagtctagacccaccaatagaggaagagcatcagctgagaaatagcattgaaaagctgagagcccgcctagaagctgatgaaaagaagcagctctgtgtcttacaacaactgaaggaaagtgagcatcatgcagatttacttaagggtagagtggagaaccttgaaagagagctagagatagccaggacaaaccaagagcatgcagctcttgaggcagagaattccaaaggagaggtagagaccctaaaagcaaaaatagaagggatgacccaaagtctgagaggtctggaattagatgttgttactataaggtcagaaaaagaaaatctgacaaatgaattacaaaaagagcaagagcgaatatctgaattagaaataataaattcatcatttgaaaatattttgcaagaaaaagagcaagagaaagtacagatgaaagaaaaatcaagcactgccatggagatgcttcaaacacaattaaaagagctcaatgagagagtggcagccctgcataatgaccaagaagcctgtaaggccaaagagcagaatcttagtagtcaagtagagtgtcttgaacttgagaaggctcagttgctacaaggccttgatgaggccaaaaataattatattgttttgcaatcttcagtgaatggcctcattcaagaagtagaagatggcaagcagaaactggagaagaaggatgaagaaatcagtagactgaaaaatcaaattcaagaccaagagcagcttgtctctaaactgtcccaggtggaaggagagcaccaactttggaaggagcaaaacttagaactgagaaatctgacagtggaattggagcagaagatccaagtgctacaatccaaaaatgcctctttgcaggacacattagaagtgctgcagagttcttacaagaatctagagaatgagcttgaattgacaaaaatggacaaaatgtcctttgttgaaaaagtaaacaaaatgactgcaaaggaaactgagctgcagagggaaatgcatgagatggcacagaaaacagcagagctgcaagaagaactcagtggagagaaaaataggctagctggagagttgcagttactgttggaagaaataaagagcagcaaagatcaattgaaggagctcacactagaaaatagtgaattgaagaagagcctagattgcatgcacaaagaccaggtggaaaaggaagggaaagtgagagaggaaatagctgaatatcagctacggcttcatgaagctgaaaagaaacaccaggctttgcttttggacacaaacaaacagtatgaagtagaaatccagacataccgagagaaattgacttctaaagaagaatgtctcagttcacagaagctggagatagaccttttaaagtctagtaaagaagagctcaataattcattgaaagctactactcagattttggaagaattgaagaaaaccaagatggacaatctaaaatatgtaaatcagttgaagaaggaaaatgaacgtgcccaggggaaaatgaagttgttgatcaaatcctgtaaacagctggaagaggaaaaggagatactgcagaaagaactctctcaacttcaagctgcacaggagaagcagaaaacaggtactgttatggataccaaggtcgatgaattaacaactgagatcaaagaactgaaagaaactcttgaagaaaaaaccaaggaggcagatgaatacttggataagtactgttccttgcttataagccatgaaaagttagagaaagctaaagagatgttagagacacaagtggcccatctgtgttcacagcaatctaaacaagattcccgagggtctcctttgctaggtccagttgttccaggaccatctccaatcccttctgttactgaaaagaggttatcatctggccaaaataaagcttcaggcaagaggcaaagatccagtggaatatgggagaatggtggaggaccaacacctgctaccccagagagcttttctaaaaaaagcaagaaagcagtcatgagtggtattcaccctgcagaagacacggaaggtactgagtttgagccagagggacttccagaagttgtaaagaaagggtttgctgacatcccgacaggaaagactagcccatatatcctgcgaagaacaaccatggcaactcggaccagcccccgcctggctgcacagaagttagcgctatccccactgagtctcggcaaagaaaatcttgcagagtcctccaaaccaacagctggtggcagcagatcacaaaaggtcaaagttgctcagcggagcccagtagattcaggcaccatcctccgagaacccaccacgaaatccgtcccagtcaataatcttcctgagagaagtccgactgacagccccagagagggcctgagggtcaagcgaggccgacttgtccccagccccaaagctggactggagtccaagggcagtgagaactgtaaggtccagtgaaggcactttgtgtgtcagtacccctgggaggtgccagtcattgaatagataaggctgtgcctacaggacttctctttagtcagggcatgctttattagtgaggagaaaacaattccttagaagtcttaaatatattgtactctttagatctcccatgtgtaggtattgaaaaagtttggaagcactgatcacctgttagcattgccattcctctactgcaatgtaaatagtataaagctatgtatataaagctttttggtaatatgttacaattaaaatgacaagcactatatcacaatctctgtttgtatgtgggttttacactaaaaaaatgcaaaacacattttattcttctaattaacagctcctaggaaaatgtagacttttgctttatgatattctatctgtagtatgaggcatggaatagttttgtatcgggaatttctcagagctgagtaaaatgaaggaaaagcatgttatgtgtttttaaggaaaatgtgcacacatatacatgtaggagtgtttatctttctcttacaatctgttttagacatctttgcttatgaaacctgtacatatgtgtgtgtgggtatgtgtttatttccagtgagggctgcaggcttcctagaggtgtgctataccatgcgtctgtcgttgtgcttttttctgtttttagaccaattttttacagttctttggtaagcattgtcgtatctggtgatggattaacatatagcctttgttttctaataaaatagtcgccttcgttttctgtaaaaaaaaaaaaaaaaaaaaaa

SEQ ID NO: 7 - DNA, 1836 bp, Homo sapiens
ggcacgagggcaagtttgaaaagtgatgacggttgacgtttgctgatttttgactttgcttgtagctgctccccgaactcgccgtcttcctgtcggcggccggcactgtagattaacaggaaacttccaagatggaaactttgtctttccccagatataatgtagctgagattgtgattcatattcgcaataagatcttaacaggagctgatggtaaaaacctcaccaagaatgatctttatccaaatccaaagcctgaagtcttgcacatgatctacatgagagccttacaaatagtatatggaattcgactggaacatttttacatgatgccagtgaactctgaagtcatgtatccacatttaatggaaggcttcttaccattcagcaatttagttactcatctggactcatttttgcctatctgccgggtgaatgactttgagactgctgatattctatgtccaaaagcaaaacggacaagtcggtttttaagtggcattatcaactttattcacttcagagaagcatgccgtgaaacgtatatggaatttctttggcaatataaatcctctgcggacaaaatgcaacagttaaacgccgcacaccaggaggcattaatgaaactggagagacttgattctgttccagttgaagagcaagaagagttcaagcagctttcagatggtattcaggagctacaacaatcactaaatcaggattttcatcaaaaaacgatagtgctgcaagagggaaattcccaaaagaagtcaaatatttcagagaaaaccaagcgtttgaatgaactaaaattgttggtggtttctttgaaagaaatacaagagagtttgaaaacaaaaattgtggattctccagagaagttaaagaattataaagaaaaaatgaaagatacggtccagaagcttaaaaatgccagacaagaagtggtggagaaatatgaaatctatggagactcagttgactgcctgccttcatgtcagttggaagtgcagttatatcaaaagaaaatacaggacctttcagataatagggaaaaattagccagtatcttaaaggagagcctgaacttggaggaccaaattgagagtgatgagtcagaactgaagaaattgaagactgaagaaaattcgttcaaaagactgatgattgtgaagaaggaaaaacttgccacagcacaattcaaaataaataagaagcatgaagatgttaagcaatacaaacgcacagtaattgaggattgcaataaagttcaagaaaaaagaggtgctgtctatgaacgagtaaccacaattaatcaagaaatccaaaaaattaaacttggaattcaacaactaaaagatgctgctgaaagggagaaactgaagtcccaggaaatatttctaaacttgaaaactgctttggagaaataccacgacggtattgaaaaggcagcagaggactcctatgctaagatagatgagaagacagctgaactgaagaggaagatgttcaaaatgtcaacctgattaacaaaattacatgtctttttgtaaatggcttgccatcttttaattttctatttagaaagaaaagttgaagcgaatggaagtatcagaagtaccaaataatgttggcttcatcagtttttatacactctcataagtagttaataagatgaatttaatgtaggcttttattaatttataattaaaataacttgtgcagctattcatgtctctactctgccccttgttgtaaatagtttgagtaaaacaaaactagttacctttgaaatatatatatttttttctgttaaaaaaaaaaaaaaaaaaaaaa

SEQ ID NO: 8 - DNA, 478 bp, Homo sapiens
ataaaatctctccccagaccatcatcacttttaatcctccccagaaggggcttcatcttcagacccttcatccccagatttctcgggtggggggcttgtagatgttttcttttctggcgggctttccggttcctcatcttcttctttgggagaaggagtcttttcctttgatgcctttgaagctgtggggcgacccactttccctttgcctttcactggacttggcgtcactgtagcctttagtctgggtttgggcattttcttttcttttctttcaggtttggacttcttaaccatctttttgtttttctttttcgaactgccatagtcactatcgtcatcatcttccattaggaaatcttcatcgctgccggaatctttctcctggaatggtgcctcatcctcctcttcttgttcttcctcactgcccacatcttccatgagcatctctctctgtttagaagctgctttagatgcc

SEQ ID NO: 9 - DNA, 492 bp, Homo sapiens
  misc_feature: n = a, t, g, or c
tttttttttggtataatcagtgcttcataaaggcatcctaatttttatatctttaaagacaacctaccatgaaataagaagaatccataattataattctaaaaaccatgtaatcaacttgtgtccatgaactcacgcatagcagcatcctctactcagggacacattatgttgctatgaatccttttaagaattctttgagtttttcttcctttctacttctacctcattatatctacacctttcttaactaccttgcagtcaaaagccaaactacctgggatgctgctcctctagtttgtcttcagctaaggatagaggcaaagaatgagggacggggaggaaaaagggagcagggatacgagaaacagaaaggaaganaaaagaatccttttattttcaccctctcttcgcccattttttttcttttcccttcactgtacatctaattcttttgaccacttcaattttcatcatagtaggtagagcaca

SEQ ID NO: 10 - DNA, 415 bp, Homo sapiens
  misc_feature (1)..(415): n = a, t, g, or c
tttgttttgntttnggacttgctgtcgcccaagctgaagtgcagtagcgcaatctcggctcgctgcaacctccgcctcccgagttcaagcgattctcctgcttcagcctcccaagtggctgggattacaggcgcccgcaccgcgcccagctaattttttgtatttttagtagagaggggtttcaccatgtggggccagggctggtctcgaactcctgacctcaggggtgatcttgcccacctcgggtcccccaaagtgctgggcatgacagggcgtgngaacccatgnctggggcctcttaatgggctaactttcttacccgagatttcttagggggaaggataggcagagacctcttccaatcaggaatgcttccttcttttggggagagcctacccgcctgggggggggttca

SEQ ID NO: 11 - DNA, 879 bp, Homo sapiens
  misc_feature (1)..(879): n = a, t, g, or c
agtacaggagcttgtgccgtggcccacagcccacagcccacagccatgggtgggacctgacggtgaagatgctggcgggcaacgaattccaggtgtccctgagcagctccatgtcggtgtcagagctgaaggcgcagatcacccagaagatcggcgtgcacgcgttccagcagcgtctggctgtccacccgagcggtgtggcgctgcaggacagggtcccccttgccagccagggcctgggccgagcagcacggtcctgctggtggtggacaaatgcgacgaacctctgaacatcctggtgaggaataacaagggccgcagcagcacctacgaggtgcggctgacgcagaccgtggcccacctgaagcagcaagtgagcgggctggagggtgtgcaggacgacctgttctggctgaccttcgaggggaagcccctggaggaccagctcccgcttggggagtacggcgtcaagcgcctgagcaccgtgttcatgaatctgcgcctgcgggaagcggcacagagcctgcgggcggactaagggcctccacagcatccgacaggatcagggcggaaataaggctgttgtaagagagaaaagagaaaaaaaagttcttgataacggcgaggctaatccgttgntaggtaatttacttgcatgccgctgtttaaatgtactggaactggcgtacaactatcgctgagaaccgttccgatggtatagaagccgccgtgcgtctaaatccatgatgcatgcgcctttgcgcttacgtgggagttgttcgggattacgcggtttttctttgaggccgaaaagcgttggtttcccaaaagggtgcctgattttgatagtcacaacttgtgtaaaaaatttggtttacc

SEQ ID NO: 12 - DNA, 281 bp, Homo sapiens
  misc_feature (1)..(281): n = a, t, g, or c
acagtagtccattcctagggggaatgggccccaaggttttgtttttttatttcgtttttggggtacaggtggtgtttggttacatggatgagttctttagtgatttctgcgactttagcgcacccatcacccgagcagtgtacactgtacccaatatgtagtctttcatccctcaccccactccaagatttagttctgccagacgatacatgttgccttcacttctttttagtttatttgcctggacccatctaagtcatacttaaanctctataaagcat

SEQ ID NO: 13 - DNA, 463 bp, Homo sapiens
  misc_feature (1)..(463): n = a, t, g, or c
ttttttcccagngccactttttattttaaacaagaagcagcgggcccccnnacagccacggggacattgtctttccagaacagtagacacnagtgccttgtggctttgtaagaagcctgacaggagaagattcatgccttttctccttggcccnccatgaccaaangaagaaaataaaaatcacacaccatacactgccacacccatctccacccctccctttcagtaatatccaagtattcatccttctggccaaagaaactggctacaattctgattctaaagaaaaccttcatgcagccaagaaactcagggctctggaggggagaggcttactctgatactttccacatgcactgcccactggcatcaagtttaactccatccaaaaccatcacatggatggccagggacaggactggctacaaaaaaaagccatgaactcagctcaccatgctaagaa

SEQ ID NO: 14 - DNA, 4036 bp, Homo sapiens
gtggagccgagcggtgcggagcagatctggtggttctccggagagcagcttccttgggtgttacatgagccaagccctcactgtacagaagagtgagagctgaaacctgttccctgagctgatcagaaggacatcccttggcccctccatctgggctcctgtggataggaggggctgggtgagcaggccagctgggctatggtgtggtgcctcggcctggccgtcctcagcctggtcatcagccagggggctgacggtcgagggaagcctgaggtggtatcggtggtgggccgggctggggagagtgtggtgctgggctgtgacctgctgcccccggccggccggccccccctgcatgtcatcgagtggctgcgctttggattcctgcttcccatcttcatccagttcggcctctactctccccgaattgaccctgattacgtgggacgagtccggctgcagaagggggcctctctccagattgagggtctccgggtggaagaccagggctggtacgagtgccgcgtgttcttcctggaccagcacatccctgaagacgattttgctaacggctcctgggtgcatctgacagtcaattcaccccctcaattccaggagacacctcctgctgtgttggaagtgcaggaactggagcctgtgaccctgcgttgtgtggcccgtggcagccccctgcctcatgtgacgtggaagctccgaggaaaggaccttggccagggccagggccaggtgcaagtgcagaacgggacgctgcggatccgccgggtagagcgaggcagctctggggtctacacctgccaagcctccagcactgagggcagcgccacccacgccacccagctgctagtgctaggacccccagtcatcgtggtgccccccaagaacagcacagtcaatgcctcccaggatgtttcattggcctgccatgctgaggcataccctgctaacctcacctacagctggttccaggacaacatcaatgtcttccacattagccgcctgcagccccgggtgcggatcctggtggacgggagcctgcggctgctggccacccagcctgatgatgccggctgctacacctgtgtgcccagcaatggcctcctgcatccaccctcagcctctgcctacctcactgtgctctacccagcccaggtgacagctatgcctcctgagacacccctgcccataggcatgccgggggtgatccgctgcccggttcgtgccaaccccccactgctctttgtcagctggaccaaggatggaaaggccctgcagctggacaagttccctggctggtcccagggcacagaaggctcactgatcatcgccctggggaacgaggatgccctgggagaatactcctgcaccccctacaacagtcttggtaccgccgggccctctcctgtgacccgcgtgctgctcaaggctcccccagcttttatagagcggcccaaggaagaatatttccaagaagtagggcgggagctgctcatcccctgctccgcccaaggggaccctcctcctgttgtctcttggaccaaggtgggccgggggctgcaaggccaggcccaggtggacagcaacagcagcctcatcctgcgaccattgaccaaggaggcccacgggcactgggaatgcagtgccagcaatgctgtggcccgagtggccacctccacgaacgtctacgtgctgggcactagccctcatgttgtcaccaatgtgtccgtggtggctttgcccaagggtgccaatgtctcctgggagcctggctttgatggtggttatctgcagagattcagtgtctggtacaccccactggccaagcgtcctgaccgaatgcaccatgactgggtgtccttggcagtgcctgtgggggctgctcacctcctagtgccagggctgcagccccacacccagtaccagttcagcgtgctagctcagaacaagctggggagtggtcccttcagcgaaatcgtcttgtctgctccggaagggcttcctaccacgccagctgcacccgggcttcccccaacagagataccgcctcccctgtcccctccgcggggtctggtggcagtgaggacaccccggggggtactcctgcattgggatcccccagagctggtccctaagagactggatggctacgtcttggaaggccggcaaggctcccagggctgggaggtgctggacccggctgtggcaggcacagaaacagagctgctggtgccaggcctcatcaaggatgttctctacgagttccgcctcgtggccttcgcgggcagcttcgtcagcgaccccagcaacacggccaacgtctccacttccggtctggaggtctacccttcgcgcacgcagctgccgggcctcctgcctcagcccgtgctggccggcgtggtgggcggagtctgctttctgggagtggccgtccttgtgagcatcctggccggctgcctcctgaaccggcgcagggctgcccgccgccgccgcaagcgcctccgccaagatccacctcttatcttctctccgaccgggaagtcagctgcaccctctgctctgggctcaggcagtcctgacagcgtggcgaagctgaagctccagggatccccagtccccagcctgcgccagagtctgctctggggggatcctgccggaactcccagcccccacccggatcctccatctagccggggacccttacctctggagcccatttgccggggcccagacgggcgctttgtgatggggcccactgtggcggccccccaggaaaggtcaggccgggagcaggcagaacctcggactccagcccagcgtctggcccggtcctttgactgtagcagcagcagccccagtggggcaccccagcccctctgcattgaagacatcagccctgtggcaccccctccagcagccccacccagtcccttgccaggtcctggacccctgctccagtacctgagcctgcccttcttccgagagatgaatgtggatggggactggcccccgcttgaggagcccagccctgctgcacccccagattacatggatacccggcgctgtcccacctcatctttccttcgttctccagaaacccctcctgtatcccccagggaatcacttcctggggctgtggtaggggctggggccactgcagagcccccttacacagccctggctgactggacactgagggagcggctgctgccaggccttctccctgctgcccctcgaggcagcctcaccagccagagcagtgggcgaggcagcgcttcgttcctgcggcccccctccacagccccctctgcaggaggcagctacctcagccctgctccaggagacaccagcagctgggccagtggccctgagagatggccccgaagggagcatgtggtgacagtcagcaagaggaggaacacatctgtggacgagaactatgagtgggactcagaattccctggggacatggaattgctggagactttgcacctgggcttggccagctcccggctcagacctgaagctgagccagagctaggtgtgaagactccagaggagggctgcctcctgaacactgcccatgttactggccctgaggcccgctgtgctgcccttcgggaggaattcctggccttccgccgccgccgagatgctactagggctcggctaccagcctatcgacagccagtcccccaccccgaacaggccactctgctgtgaacatccctaatgtgaggctgtgaaaaggcatatggacctgcaaaggaggcccccaaccagacagacctagtttcaaacgagggcactgcccctgcctgcccctttggtgcccaggcacagaccctgatagtgggtttgggtcaccttggtatggaatgtatgtgctgaccccctaggtgagtctggggattggaacagggatcttaggtctgcctctctctctctctctctctctctgtgtgtgtgtgtgtgtgtgtgtgaagttttttacaggtgaataaacaaagtttgaaagatg

SEQ ID NO: 15 - DNA, 553 bp, Homo sapiens
  misc_feature (1)..(553): n = a, t, g, or c
aaaacattaaataattttattcttttctcatttacagtagcccagtggtaagcatgttagaaaacctgaagaaatttaaaagtttttggtttacaaaaagcatgtataaaaatacctgttcagacaaacaaagatctgatcattacattgcccagctttaagaatgccaaaaataactaaaatactgtcaatcaaatgagagggctacatgggtttattaaagtttattttaacaattttagctaagcagaatgtgctaatgtaattcaagttacagttactgccagataacataagagaaaacattgtgtgtggccacttaagattatgcctcaaacagatactgtttcgtgcgcagaacagagttggggaacacagctgggttaagtttcaatggtaagcagcaataaagatcaagaaaatccccaacttttctaataaccgctatacaatatgaaaaaaaaaatagtatctatcaccacctcttaacaatggacatcanaattaggattgtaggttttctaagtgcttggataaaaaatgcgaacacagt

SEQ ID NO: 16 - DNA, 1067 bp, Homo sapiens
agtcattttvgttaaatatacattagagcctttttagaaggctgcaaataaacactatgtcaaaatgtgtagttttaaactcagactcgaaagchaagawaagcacctccttcagtwattactctgaccaaggcataagaattcacttagacaaaaagmtttcaaaacctacctaaaaataagatagttcataaatkttcaamackgtccttccctgtggcggacagcccttgakcttkgtcagasttagcaaatcccsscatgccctcatgtcagcctttymagtcactgacaactcctataaatttagcatcatttctcaaatctgtatagttttctcattccgaatgcttaaacatttaggtcaaaaattaaaataccagtagaaaaatattcatctttagccaggttgtatagttaacaacatggcaagaaactgatgagaacatttaaacattcagagcataaaaatacttcaaagcattacgaaacttgaacttagcattttcctaaattttagtagttccaactacaggaaaataaaactgccataaggactgagatgatttaagccaactcaaattttttcctgattcctgacatcaatattatagttttattatagtaacaaatagttgtsacagtgagacctacacacatttacagaattatatttaaattcatatagaatatttacatttttaagtkatatttttgaaattagaagacgarkacagctgaagtttgataacaaagaaatatatataagacaaaaatagacaagagttaacaataaaaacacaactatctgttgacataacatatggaaactttttgtcagaaagctacatcttcttaatctgattgtccaaatcattaaaatatggatgattcagtgccattttgccagarattcgtttgggctggatcatagattaamattttcgagagcaatccaagccattctcatccaagtttttgacatgggatgctaggcttcctggttccaatttgggaaatgtattcttatagtctgtaagatttcacttctggcacamttcaatatt

SEQ ID NO: 17 - DNA, 1658 bp, Homo sapiens
ggcacgagctcggctcctggaaagatggaggcagcggagacagaggcggaagctgcagccctagaggtcctggctgaggtggcaggcatcttggaacctgtaggcctgcaggaggaggcagaactgccagccaagatcctggttgagtttgtggtggactctcagaagaaagacaagctgctctgcagccagcttcaggtagcggatttcctgcagaacatcctggctcaggaggacactgctaagggtctcgaccccttggcttctgaagacacgagccgacagaaggcaattgcagctaaggaacaatggaaagagctgaaggccacctacagggagcacgtagaggccatcaaaattggcctcaccaaggccctgactcagatggaggaagcccagaggaaacggacacaactccgggaagcctttgagcagctccaggccaagaaacaaatggccatggagaaacgcagagcagtccagaaccagtggcagctacaacaggagaagcatctgcagcatctggcggaggtttctgcagaggtgagggagcgtaagacagggactcagcaggagcttgacggggtgtttcagaaacttggaaacctgaagcagcaggcagaacaggagcgggacaagctgcagaggtatcagaccttcctccagcttctgtataccctgcagggtaagctgttgttccctgaggctgaggctgaggcagagaatcttccagatgataaaccccagcagccgactcgaccccaggagcagagtacaggagacaccatggggagagaccctggtgtgtccttcaaggctgttggtctacaacctgctggagatgtaaatttgccatgacttcctggaggacagcagcatggagaaagatcctagaaaaggcctctgacttccctcacctcccaaccatcattacaggaaagactgtgaactcctgagttcagcttgatttctgactacatcccagcaagctctggcatctgtggattaaaatccctggatctctctcagttgtgtatttgttcatcttcatatgctggcaggaacaactattaatacagatactcagaagccaataacatgacaggagctgggactggtttgaacacagggtgtgcagatggggagggggtactggccttgggcctcctatgatgcagacatggtgaatttaattcaaggaggaggagaatgttttaggcaggtggttatatgtgggaagataattttattcatggatccaaatgtttgttgagtcctttctttgtgctaaggttcttgcggtgaaccagaattataacagtgagctcatctgactgttttaggatgtacagcctagtgttaacattcttggtatctttttgtgccttatctaaaacatttctcgatcactggtttcagatgttcatttattatattcttttcaaagattcagagattggcttttgtcatccactattgtatgttttgtttcattgacctctagtgataccttgatctttcccactttctgttttcggattggagaagatgtaccttttttgtcaactcttacttttatcagatgatcaactcacgtatttggatctttatttgttttctcaaataaatatttaaggttaaaaaaaaaaaaaaaaaaa

SEQ ID NO: 18 - DNA, 655 bp, Homo sapiens
tttttttttttttttttgaacaggcagaaactctttaatcaggctttttttccaactctaaaacaaaatcccattttttccttaaatttagttcctcaggaacagagaactttgcaatgatgatctcaactctgcatcatctggtgactcctgattctgcaggactaagacatttcccaagagttctgctgcatcagccagtgaggacaagagttcttcagtgcggttcagctcaaggacacctaggcttccccagcagggggcttgcttgcaggtctgacaaaccacagagcgttgagcagatggcctgggactcccagacctggcagagggttttattagggcccgcctggcctgcaccgtttcatccaagtaccctgacccagcactcatcttccctggcattctctgttatccaccagctcctctgcacacctcagcgtctacttccacgaacttctaaacatcaaaaggtacaatggccaggggtgcggcaggagagtcgggggcagggcagccttcaaatccacactattgaatccacacgatggaaagaagagaaagatggggaaattctccagagatcatgagatgcatccagcgtgttctcatgtgagaggataggaagccaaaactaaatgctatcagccccgcg

SEQ ID NO: 19 - DNA, 1585 bp, Homo sapiens
acagcagttacactgcggcgggcgtctgttctagtgtttgagccgtcgtgcttcaccggtctacctcgctagcatgtcgggccgcggcaagactggcggcaaggcccgcgccaaggccaagtcgcgctcgtcgcgcgccggcctccagttcccagtgggccgtgtacaccggctgctgcggaagggccactacgccgagcgcgttggcgccggcgcgccagtgtacctggcggcagtgctggagtacctcaccgctgagatcctggagctggcgggcaatgcggcccgcgacaacaagaagacgcgaatcatcccccgccacctgcagctggccatccgcaacgacgaggagctcaacaagctgctgggcggcgtgacgatcgcccagggaggcgtcctgcccaacatccaggccgtgctgctgcccaagaagaccagcgccaccgtggggccgaaggcgccctcgggcggcaagaaggccacccaggcctcccaggagtactaagagggcccgcgccgcggccggccgccccagctccccatgccaccacaaaggcccttttaagggccaccaccgccctcatggaaagagctgagccgcttcagactgcggggcaagcgggccgcggctcccttcccctcccctcccctcgcccgccttcgccgcccggcctcgagtccccgcccgcccccgctcccgtcccgcaccgcctgccgcgtcggcctcgggcctgccctgtccgccgtccgccctccggtagggttcgggccttccggatgcggcttgggcgctcttcggggacctccgtggcgcggaagacccgagcctgccggggggaggccggcggcgccgcacctgcccgcctcggcgttcgtgactcagccgccccatcccgagtcgctaaggggctgcggggaggccgcagcaccttctggaagacttggccttccgctctgacgcagggccgaggtgggcagtccaggccgagagccggcggccctgaaggtgagtgaggccctcggcagctgcagccggggtgtctggtacccccccggcgtggtgcttagcccaggactttcagacggccgctggccgggaggctttggtgggagagacgcgatcgccgatttcggtctggcgccccttctgcggccgggacccaggcctttcacatcagctctccctccatcttcattcataggtctgcgctggggccgggacgaagcacttggtaacaggcacatcttcctcccgagtgactgcctcctaggaggacatttaggggagggcagaggcctgcagtttggcttcacggctggctatgtggacagcaagagtcgttttgcggaacgcgactggcagccaggcctgtcgggcccccgacgccgccccatttcccttccagcaaactcaactcggcaatccaagcacctagataccagcacaagtcggttaatccctgtctggactgagcctccgttggcttctgaactggaattctgcagctaacccttccacgactagaaccttaggcattggggagttttagatggactaattttattaaaggattgtttttttttt

SEQ ID NO: 20 - DNA, 923 bp, Homo sapiens
  misc_feature (1)..(923): n = a, t, g, or c
ttgtggctgagaatgctggagatgctcagttctctccctcacaaggtaggccacaaattcttggtggtgccctcacatctggggtcttcaggcaccagccatgcctgccgaggagtgctgtcaggacagaccatgtccgtgctaggcccaggcacagcccaaccactcctcatccaagtctctcccaggtttctggtcccgatgggcaaggatgacccctccagtggctggtaccccaccatcccactacccctcacatgctctcactctccatcaggtccccaatcctggcttccctcttcacgaactctcaaagaaaaggaaggataaaacctaaataaaccagacagaagcagctctggaacaaaaagtacaaaaagacagccagaggtgtgcggagagggtgaggtggccgcgtggacgtgggtagataatcgcatgcagcactggaactcctgatgaggggtggggtcccacttctcctcaaggtttgaaggattggggggaaggggtcagctgactcagagaagtaggatctctgcactggaacttgaggcttctgtctcctccatgggccccacagtcacagggacatgaaatccgtggcctggaggaggagagggagaacagagaagcagcgcccagaggtgttctgagcagcaggttgatgccctaaaattaacagtttgtcttttagcactgtgtacttcttggaagagatgngttgggaatggcacagtggtggagattacacatttaagttgcccctctcctctgcaatggaaggcggaaaaaaaagagccctccatgtttatttcccgggaaatttttttggaggagggaaattgttcccgagaccccccaagggcccaaaaagccgtgtttctttttttcacggggaaaggaaaaccaaacacgagagg

SEQ ID NO: 21 - DNA, 3885 bp, Homo sapiens
ccgggccgcctcgctcgctcccagctctgtcagtggcccgcggggcccgatcgctgcgcccgcggccagggccgaggcaggcctgacccggggccgggcagcccgcgcgactttcggaacatggcaacccgtgtgtgtctcatcccagaaagagaagactttaaccactgtgatgcctgagaatccagtgtgacgtttctccagatacttcatgctgttcacctgtgtcctcgccgcaccactgccgcacacgactcctgaaccatgggggaaaacgaggatgagaagcaggcccaggcggggcaggtttttgagaactttgtccaggcatccacgtgcaaaggtaccctccaggccttcaacattctcacacgacacctggacctagaccctctggaccacagaaacttttattccaagctcaagtccaaggtgaccacctggaaagccaaagccctgtggtacaaattggataagcgtggttcccacaaagagtataagcgagggaagtcgtgcacgaacaccaagtgtctcatagttgggggaggaccctgtggcttgcgcactgccattgaacttgcctacctgggagccaaagtggtcgtggtggagaagagggactccttctcccggaacaacgtgctacacctctggcctttcaccatccatgaccttcggggcctgggagccaagaagttctatgggaagttctgtgctggctccatcgaccatatcagtattcgccaactacagctcatcctattcaaggtggccctgatgctgggagttgaaatccatgtgaatgtggagttcgtgaaggttctagagcctcctgaagatcaagaaaatcaaaaaattggctggcgggcagaatttctccctacagaccattctctgtcggagtttgagtttgacgtcatcattggtgccgatggccgcaggaacaccctggaagggttcagaagaaaagaattccgtgggaagctggcgattgccatcaccgccaacttcataaacagaaacagcacagcggaagccaaggtggaagagattagtggtgtggctttcatcttcaatcagaaattttttcaggaccttaaagaagaaacaggcatagatcttgagaacattgtttactacaaggactgcacccactattttgtaatgacagccaagaagcagagcctgctcgacaaaggtgtcatcattaacgactacatcgacacagagatgctgctgtgtgcggagaacgtgaaccaagacaacctgctatcctatgcccgggaagctgcagactttgccaccaactaccagctgccatccttagactttgccatgaaccactatgggcagcctgatgtggccatgtttgactttacctgcatgtatgcctcagagaacgcggccctggtgcgggagcggcaggcgcaccagctgctcgtggcccttgtgggtgacagcttgcttgagccattttggcccatgggtacaggctgtgcccgtggcttcctggcagcctttgacacggcatggatggtgaagagctggaaccagggcacccctcccctggagctgctggctgaaagggaaagtctctaccggctgttacctcagacaaccccggagaacatcaacaagaactttgagcagtacacgttggacccagggacacggtacccaaacctcaactcacactgtgtcaggccccatcaggtgaagcatttgtatatcactaaggagctggagcactaccctctcgagagactgggctcggtgaggagatctgtcaacctctccaggaaggagtcagatatccggcccagcaagctcctgacctggtgccagcagcagacagagggctaccagcatgtcaacgtcaccgacctgaccacatcctggcgcagtgggttggccctgtgtgccatcatccaccgcttccggcctgagctcatcaactttgactctttgaatgaagatgatgctgtggagaacaaccagctcgcatttgatgtggccgagcgagagtttgggatccctccagtgaccacgggcaaagagatggcatctgcccaggagcctgacaagctcagcatggtcatgtacctctccaagttctacgagctcttccggggcaccccactgaggcccgtggattcttggcgcaaaaactatggagaaaatgctgacctcagcttggccaaatcatccatttctaataactatctcaacctcacatttccaaggaagaggactccacgggtggatggtcaaaccggagagaatgacatgaacaaacggagacggaagggcttcaccaacctggacgagccttcaaacttttccagccgtagcttgggctccaatcaagagtgtgggagcagtaaggaaggtggaaatcagaacaaagtcaagtccatggcgaatcagctgctggccaagtttgaggagagcactcggaacccctcactcatgaagcaggaacgccgtgtctcagggataggtaagccggtcctgtgctcttcctccggccctcctgttcactcttgctgccccaagccggaggaggccacacccagcccatcacctcctctgaaaaggcagttcccctctgtggtcgtgacggggcacgtgctcagagagctcaagcaagtgtctgctggcagtgagtgcctgagcagaccttggagagccagagccaagtctgacctacagctgggtgggacagaaaatttcgctaccctgccttctacccgcccgagggcgcaggctctttccggggtgctgtggcggctgcagcaagtggaggaaaagattctccagaagagggctcagaacttggccaacagggaatttcacacaaagaacattaaggagaaggcggctcaccttgcctccatgtttggacacggggatttcccgcagaataaactgctctctaaaggcctgtctcatactcatcctccatctcctccctctcgccttccgtctcctgatccagctgcttcttcctctccatcaactgttgactctgcttctcctgccagaaaggaaaagaagtcaccttcagggttccattttcatcccagccatttgagaacagtgcatcctcagctgacggtagggaaagtgtccagcggaataggggctgcagctgaagtcctggtcaatctgtacatgaatgatcacagacctaaggcccaggccacctctccagacctggaatctatgcgaaagtcatttccccttaacctgggaggcagcgacacgtgttacttctgtaagaaacgtgtgtacgtgatggaacggctgagcgccgagggccacttcttccaccgggagtgtttccgctgcagcatctgtgccaccaccttgcgcctggccgcctacacctttgactgcgatgaaggcaaattttactgcaagcctcacttcattcactgtaaaaccaatagcaaacaacggaagagacgggcagagttgaagcaacaaagagaggaggaggcaacatggcaagagcaggaagcccctcggagagacactcccaccgaaagttcttgcgcagtggccgccattggcaccctggaaggcagccccccagttcatttcagccttccagtgctacacccacttcttggctgacacacttctgctctaagagtctccctccctttatagaatgtcaaccaaagagtgccctcctcccctctcagcctcctctttagctagcctccccatctcatcacaacgcatgtctgtgacctttggtaatcatttacagtgccacacggaaccctgtattttgcacacagcaaaacaaacaatgtttagctttatttatggtatttgatgctgtaaatggaaataaatattgttctttataaagct

SEQ ID NO: 22 - DNA, 365 bp, Homo sapiens
aacagaagcacctgcctcacttcaagccgtggctgcacccggagcagagcccgttgccgagcctggcgctgtcggagctgtcggtgcagcatgcggactcactggagaacatcgacgagagcgcggtggccgagagcagagaggagcggatgggcggcgcgggcggcgagggcagcgacgacgacacctcgctcacctgagcgccgcaccgcttcagggacggagacaggaccgggcgagccctggggcggcggccgctcctgcactttctcccctcccccacccggcacctggtggcaccgggccaggcccaggcgggtgctgcagcctggctggacagagcccaataaacgatccacagcctc

SEQ ID NO: 23 - DNA, 3492 bp, Homo sapiens
ggttggaggagcccggagcccgccttcggagctacggcctaacggcggcggcgactgcagtctggagggtccacacttgtgattctcaatggagagtgaaaacgcagattcataatgaaaactagcccccgtcggccactgattctcaaaagacggaggctgccccttcctgttcaaaatgccccaagtgaaacatcagaggaggaacctaagagatcccctgcccaacaggagtctaatcaagcagaggcctccaaggaagtggcagagtccaactcttgcaagtttccagctgggatcaagattattaaccaccccaccatgcccaacacgcaagtagtggccatccccaacaatgctaatattcacagcatcatcacagcactgactgccaagggaaaagagagtggcagtagtgggcccaacaaattcatcctcatcagctgtgggggagccccaactcagcctccaggactccggcctcaaacccaaaccagctatgatgccaaaaggacagaagtgaccctggagaccttgggaccaaaacctgcagctagggatgtgaatcttcctagaccacctggagccctttgcgagcagaaacgggagacctgtgcagatggtgaggcagcaggctgcactatcaacaatagcctatccaacatccagtggcttcgaaagatgagttctgatggactgggctcccgcagcatcaagcaagagatggaggaaaaggagaattgtcacctggagcagcgacaggttaaggttgaggagccttcgagaccatcagcgtcctggcagaactctgtgtctgagcggccaccctactcttacatggccatgatacaattcgccatcaacagcactgagaggaagcgcatgactttgaaagacatctatacgtggattgaggaccactttccctactttaagcacattgccaagccaggctggaagaactccatccgccacaacctttccctgcacgacatgtttgtccgggagacgtctgccaatggcaaggtctccttctggaccattcaccccagtgccaaccgctacttgacattggaccaggtgtttaagccactggacccagggtctccacaattgcccgagcacttggaatcacagcagaaacgaccgaatccagagctccgccggaacatgaccatcaaaaccgaactccccctgggcgcacggcggaagatgaagccactgctaccacgggtcagctcatacctggtacctatccagttcccggtgaaccagtcactggtgttgcagccctcggtgaaggtgccattgcccctggcggcttccctcatgagctcagagcttgcccgccatagcaagcgagtccgcattgcccccaaggtttttggggaacaggtggtgtttggttacatgagtaagttctttagtggcgatctgcgagattttggtacacccatcaccagcttgtttaattttatctttctttgtttatcagtgctgctagctgaggaggggatagctcctctttcttctgcaggaccagggaaagaggagaaactcctgtttggagaagggttttctcctttgcttccagttcagactatcaaggaggaagaaatccagcctggggaggaaatgccacacttagcgagacccatcaaagtggagagccctcccttggaagagtggccctccccggccccatctttcaaagaggaatcatctcactcctgggaggattcgtcccaatctcccaccccaagacccaagaagtcctacagtgggcttaggtccccaacccggtgtgtctcggaaatgcttgtgattcaacacagggagaggagggagaggagccggtctcggaggaaacagcatctactgcctccctgtgtggatgagccggagctgctcttctcagaggggcccagtacttcccgctgggccgcagagctcccgttcccagcagactcctctgaccctgcctcccagctcagctactcccaggaagtgggaggaccttttaagacacccattaaggaaacgctgcccatctcctccaccccgagcaaatctgtcctccccagaacccctgaatcctggaggctcacgcccccagccaaagtagggggactggatttcagcccagtacaaacctcccagggtgcctctgaccccttgcctgaccccctggggctgatggatctcagcaccactcccttgcaaagtgctcccccccttgaatcaccgcaaaggctcctcagttcagaacccttagacctcatctccgtcccctttggcaactcttctccctcagatatagacgtccccaagccaggctccccggagccacaggtttctggccttgcagccaatcgttctctgacagaaggcctggtcctggacacaatgaatgacagcctcagcaagatcctgctggacatcagctttcctggcctggacgaggacccactgggccctgacaacatcaactggtcccagtttattcctgagctacagtagagccctgcccttgcccctgtgctcaagctgtccaccatcccgggcactccaaggctcagtgcaccccaagcctctgagtgaggacagcaggcagggactgttctgctcctcatagctccctgctgcctgattatgcaaaagtagcagtcacaccctagccactgctgggaccttgtgttccccaagagtatctgattcctctgctgtccctgccaggagctgaagggtgggaacaacaaaggcaatggtgaaaagagattaggaaccccccagcctgtttccattctctgcccagcagtctcttaccttccctgatctttgcagggtggtccgtgtaaatagtataaattctccaaattatcctctaattataaatgtaagcttatttccttagatcattatccagagactgccagaaggtgggtaggatgacctggggtttcaattgacttctgttccttgcttttagttttgatagaagggaagacctgcagtgcacggtttcttccaggctgaggtacctggatcttgggttcttcactgcagggacccagacaagtggatctgcttgccagagtcctttttgcccctccctgccacctccccgtgtttccaagtcagctttcctgcaagaagaaatcctggttaaaaaagtcttttgtattgggtcaggagttgaatttggggtgggaggatggatgcaactgaagcagagtgtgggtgcccagatgtgcgctattagatgtttctctgataatgtccccaatcataccagggagactggcattgacgagaactcaggtggaggcttgagaaggccgaaagggcccctgacctgcctggcttccttagcttgcccctcagctttgcaaagagccaccctaggccccagctgaccgcatgggtgtgagccagcttgagaacactaactactcaataaaagcgaaggtggacaaaaaaaaaaaaaaaaaa

SEQ ID NO: 24 - DNA, 1771 bp, Homo sapiens
agggtagccttctaaaagactttcttcgaaacctcaaagaacctcttctgacctttcgccttaacagagcctttatggaagcagcagaaatcacagatgaagacaacagcatagctgccatgtaccaagctgttggtgaactgccccaggccaacagggacacattagctttcctcatgattcacttgcagagagtggctcagagtccacatactaaaatggatgttgccaatctggctaaagtctttggccctacaatagtggcccatgctgtgcccaatccagacccagtgacaatgttacaggacatcaagcgtcaacccaaggtggttgagcgcctgctttccttgcctctggagtattggagtcagttcatgatggtggagcaagagaacattgaccccctacatgtcattgaaaactcaaatgccttttcaacaccacagacaccagatattaaagtgagtttactgggacctgtgaccactcctgaacatcagcttctcaagactccttcatctagttccctgtcacagagagtccgttccaccctcaccaagaacactcctagatttgggagcaaaagcaagtctgccactaacctaggacgacaaggcaacttttttgcttctccaatgctcaagtgaagtcacatctgcctgttacttcccagcattgactgactataagaaaggacacatctgtactctgctctgcagcctcctgtactcattactacttttagcattctccaggcttttactcaagtttaattgtgcatgagggttttattaaaactatatatatctccccttccttctcctcaagtcacataatatcagcactttgtgctggtcattgttgggagcttttagatgagacatctttccaggggtagaagggttagtatggaattggttgtgattctttttggggaagggggttattgttcctttggcttaaagccaaatgctgctcatagaatgatctttctctagtttcatttagaactgatttccgtgagacaatgacagaaaccctacctatctgataagattagcttgtctcagggtgggaagtgggagggcagggcaaagaaaggattagaccagaggatttaggatgcctccttctaagaaccagaagttctcattccccattatgaactgagctataatatggagctttcataaaaatgggatgcattgaggacagaactagtgatgggagtatgcgtagctttgatttggatgattaggtctttaatagtgttgagtggcacaaccttgtaaatgtgaaagtacaactcgtatttatctctgatgtgccgctggctgaactttgggttcatttggggtcaaagccagtttttcttttaaaattgaattcattctgatgcttggcccccatacccccaaccttgtccagtggagcccaacttctaaaggtcaatatatcatcctttggcatcccaactaacaataaagagtaggctataagggaagattgtcaatattttgtggtaagaaaagctacagtcattttttctttgcactttggatgctgaaatttttcccatggaacatagccacatctagatagatgtgagctttttcttctgttaaaattattcttaatgtctgtaaaaacgattttcttctgtagaatgtttgattcgtattgacccttatctgtaaaacacctatttgggataatatttggaaaaaaagtaaatagctttttcaaaatgaaaaaaaaaaaaaaaaaagat

SEQ ID NO: 25 - DNA, 652 bp, Homo sapiens
  misc_feature (1)..(652): n = a, t, g, or c
tttttttttttttagaaggcacgacatcacttttatgtatgaatgtgagaagaatgaaacactacattaacagagaacaagacaaatcagacggtgagaccggacacagcttttgtccaaagtcggcttgcaggaggcggcaggattcagcgccatggggtggccacagaggacacacaggggtcagcagaggacatgtggggtccgtggccgcgaacgctgctgaggaaaggccccagaacccctggtgtatacagtccccgaaagatgacggacgatgagtgctatgtgctcaggaggccgggaggctgagcaagccattccacaggggacgcacagcctcagggctgcgaccccacgggcagcaggcagtctttctccgagtttcaactgcagcgctggaaagagccgctccaggctcaacctccagtcgtcagagagaaaccaagaccctctgtcttcaccctcatgaccaaagtcagccgcctgtccgagcttcctgctccactccttgctgctggctagacacctggtgtttcaaggctaagacccacctggactcctacgttcacgttaatgattntggctgaagaaaggaaggcacaagtaatcacacacactttaccatcttagcctgcggaagacacaaacg

SEQ ID NO: 26 - DNA, 840 bp, Homo sapiens
ccggtgagtcgccggcgctgcagagggaggcggcactggtctcgacgtggggcggccagcgatgaagccgcccagttcaatacaaacaagtgagtttgactcatcagatgaagagcctattgaagatgaacagactccaattcatatatcatggctatctttgtcacgagtgaattgttctcagtttctcggtttatgtgctcttccaggttgtaaatttaaagatgttagaagaaatgtccaaaaagatacagaagaactaaagagctgtggtatacaagacatatttgttttctgcaccagaggggaactgtcaaaatatagagtcccaaaccttctggatctctaccagcaatgtggaattatcacccatcatcatccaatcgcagatggagggactcctgacatagccagctgctgtgaaataatggaagagcttacaacctgccttaaaaattaccgaaaaaccttaatacactgctatggaggacttgggagatcttgtcttgtagctgcttgtctcctactatacctgtctgacacaatatcaccagagcaagccatagacagcctgcgagacctaagaggatccggggcaatacagaccatcaagcaatacaattatcttcatgagtttcgggacaaattagctgcacatctatcatcaagagattcacaatcaagatctgtatcaagataaaggaattcaaatagcatatatatgaccatgtctgaaatgtcagttctctagcataatttgtattgaaaatgaaaccaccagtcgttatcaacttgaatgtaaatgtacatgtgcagatattcctaaagtgccttcgtggc

SEQ ID NO: 27 - DNA, 1546 bp, Homo sapiens
gaggctacagcgtcgaagatccccagcgctgcgggctcggagagcagtcctaacggcgcctcgtacgctagtgtcctcccttttcagtccgcgtccctccctgggccgggctggcactcttgccttccccgtccctcatggcgctgctccgacgcccgacggtgtccagtgatttggagaatattgacacaggagttaattctaaagttaagagtcatgtgactattaggcgaactgttttagaagaaattggaaatagagttacaaccagagcagcacaagtagctaagaaagctcagaacaccaaagttccagttcaacccaccaaaacaacaaatgtcaacaaacaactgaaacctactgcttctgtcaaaccagtacagatggaaaagttggctccaaagggtccttctcccacacctgaggatgtctccatgaaggaagagaatctctgccaagctttttctgatgccttgctctgcaaaatcgaggacattgataacgaagattgggagaaccctcagctctgcagtgactacgttaaggatatctatcagtatctcaggcagctggaggttttgcagtccataaacccacatttcttagatggaagagatataaatggacgcatgcgtgccatcctagtggattggctggtacaagtccactccaagtttaggcttctgcaggagactctgtacatgtgcgttggcattatggatcgatttttacaggttcagccagtttcccggaagaagcttcaattagttgggattactgctctgctcttggcttccaagtatgaggagatgttttctccaaatattgaagactttgtttacatcacagacaatgcttataccagttcccaaatccgagaaatggaaactctaattttgaaagaattgaaatttgagttgggtcgacccttgccactacacttcttaaggcgagcatcaaaagccggggaggttgatgttgaacagcacactttagccaagtatttgatggagctgactctcatcgactatgatatggtgcattatcatccttctaaggtagcagcagctgcttcctgcttgtctcagaaggttctaggacaaggaaaatggaacttaaagcagcagtattacacaggatacacagagaatgaagtattggaagtcatgcagcacatggccaagaatgtggtgaaagtaaatgaaaacttaactaaattcatcgccatcaagaataagtatgcaagcagcaaactcctgaagatcagcatgatccctcagctgaactcaaaagccgtcaaagaccttgcctccccactgataggaaggtcctaggctgccgtggcccctggggatgtgtgcttcattgtgccctttttcttattggtttagaactcttgattttgtacatagtcctctggtctatctcatgaaacctcttctcagaccagttttctaaacatatattgaggaaaaataaagcgattggtttttcttaaaaaaaaaaaaaaaaaaaaaaaaaaaaaaaaaaaaaaaaaaaaaaaaaa

SEQ ID NO: 28 - DNA, 836 bp, Homo sapiens
gtgaaacaccctcggctgggaagtcagttcgttctctcctctcctctcttcttgtttgaacatggtgcggactaaagcagacagtgttccaggcacttacagaaaagtggtggctgctcgagcccccagaaaggtgcttggttcttccacctctgccactaattcgacatcagtttcatcgaggaaagctgaaaataaatatgcaggagggaaccccgtttgcgtgcgcccaactcccaagtggcaaaaaggaattggagaattctttaggttgtcccctaaagattctgaaaaagagaatcagattcctgaagaggcaggaagcagtggcttaggaaaagcaaagagaaaagcatgtcctttgcaacctgatcacacaaatgatgaaaaagaatagaactttctcattcatctttgaataacgtctccttgtttaccctggtattctagaatgtaaatttacataaatgtgtttgttccaattagctttgttgaacaggcatttaattaaaaaatttaggtttaaatttagatgttcaaaagtagttgtgaaatttgagaatttgtaagactaattatggtaacttagcttagtattcaatataatgcattgtttggtttcttttaccaaattaagtgtctagttcttgctaaaatcaagtcattgcattgtgttctaattacaagtatgttgtatttgagatttgcttagattgttgtactgctgccatttttattggtgtttgattattggaatggtgccatattgtcactccttctacttgctttaaaaagcagagttagatttttgcacattaaaaaattcagtattaatt

SEQ ID NO: 29 - DNA, 635 bp, Homo sapiens
  misc_feature (1)..(635): n = a, t, g, or c
ctttcaccactgtaggaaaatgattgactatgcccatccctgggggtaattttggcatgtatacctgtaactagtaattaacatcttttttgtttaggcatgttcaattaatgctgtagctatcatagctttgctcattacctgaagccttgtccccaccacacaggacagccttcctcctgaagagaatgtctttgtgtgtccgaagttgagatggcctgccctactgccaaagaggtgacaggaaggctgggagcagctttgttaaattgtgttcagttctgttacacagtgcattgccctttgttgggggtacgcatgtatgaacacacatgcttgtcggaacgctttctcggcgtttgtcccttggctctcatctcccccattcctgtgcctactttgcctggagttcttctacccccgcagttgccagccacattgggagtctgtttgttccagtgggttgagctgtctttgtcgtggagatctggaactttgcacatgtcactactgggggaggtgttcctgctctagcttccacgatgaggcgccctctttacctatcctctcaatcaatantcttcttgaagcactaataattaatcctccgctgtctgcctgnagaagtaataatg

SEQ ID NO: 30 - DNA, 539 bp, Homo sapiens
  misc_feature (1)..(539): n = a, t, g, or c
ttttttcaattttttttttttttattctgcagattaaagacactcaatctttaaccttgaagggcaggcaaaaggtcggctatgctgtcaacataaaagtcagggaccattttctttttaaacacgcagtcactttcctgattattcttcacatcccctaaagtggaaactccggtgagggtcaggatggtcttcaggccacaggtggcgcctaggaggatgtctgtgtccaggcggtctcccaccatgacggtgcgctcggggttgatgccgtattcctgggacacgcagtcgaaaatgaagcggttgggcttcccgatgatgtcggcctggcgctgggcggccatctccacggttcggaccaaacacccggtacccgcgatgaagcggccgttctcaagcggaagccggttgtccatgttggtgcccacgagcaggcagccgggctgctgcaggtagcgcagggccttggtgagcttcatgtagctgaagtgcgggtcaaagcccaccaccaccgcgcgcacgtngggctccagncg

SEQ ID NO: 31 - DNA, 707 bp, Homo sapiens
tttttttttttaagggtatctgacagcaatagatttattaagtatccccgaaaatataaacacaaaccagtaaaaaacaaaaccgtaaaacgtcaggcctggagctgcaataagacagagacaggagcagctcacacgtggcctaggtggggaggacgaggccataaatactgcaggagggcggcaagggagccctagggcgaggggaaagcagggtgtcggcagcaagatggctccgggggtttagacactgctggcttcggccccggccgccacctgcctctcactccagctgcgagcagcttcacttggggccctgggcctccgactcctcctcgtcgtcttcgtacatctcgccctcttcctcggccgtggcgtcctggtactgctggtactcggacaccaggtcgttcatgttgctctcggcctcggtgaactccatctcgtccatgccctcgcccgtgtaccagtgcaggaaggccttgcgccggaacatggccgtgaactgctcggagatgcgcttgaacagctcctggatggccgtgctgttcccgatgaaggtggaggacatcttgaggccgcggggcgggatgtcacacacggccaccttcacgttgttgggatccactccacgaagtagctgctggtcttgctctggatgggcagcaatctgctcgtccaccctccttcatgggacatgcgggccc

SEQ ID NO: 32 - DNA, 1203 bp, Homo sapiens
ggaaaacggcggccgcggcgtctcctccgggacgctgaggggcccgaggagaccgtgaggctctggcctgcagctcgcgccgccatggacgctgccgaggtcgaattcctcgccgagaaggagctggttaccattatccccaacttcagtctggacaagatctacctcatcgggggggacctggggccttttaaccctggtttacccgtggaagtgcccctgtggctggcgattaacctgaaacaaagacagaaatgtcgcctgctccctccagagtggatggatgtagaaaagttggagaagatgagggatcatgaacgaaaggaagaaacttttaccccaatgcccagcccttactacatggaacttacgaagctcctgttaaatcatgcttcagacaacatcccgaaggcagacgaaatccggaccctggtcaaggatatgtgggacactcgtatagccaaactccgagtgtctgctgacagctttgtgagacagcaggaggcacatgccaagctggataacttgaccttgatggagatcaacaccagcgggactttcctcacacaagcgctcaaccacatgtacaaactccgcacaaacctccagcctctggagagtactcagtctcaggacttctagagaaaggcctggtgcaggcggcttgctgggggatgtgagcgctcaggacgtgatgaggtactcgtggttctggagctctagaaacacttctgatgcatgaaaaatgtgtgatggtgcaaggaatggattcaggatgttgttggagaaacaagtttgtgattagtccttaaaacttagctccctgggacattcttcaattccacatctgtttctagaaaccagccctttttccccccacttttgagaaataaaaaagccttaggtaaataagtcattctccctagcagagccacttgggtctcctgcatggaagccatcacacttgggcaggtgttcagtgactggtaggtgtagatacagcaggagtggccatgtggtccacggctttttaccccttcttgatcctcatttcttgggctgaatttagactctctcacagaggtggctcacagagaaggatggcagatggtgcagccaacaatgctgaccggtgcttatcctctaagccctgatccacaataaaaatggacccaactcaaaaaaaaaaaaaaaaaaaaaaaa

SEQ ID NO: 33 - DNA, 419 bp, Homo sapiens
gcgaccgcggaacccaggaaacaaccccatccgcccgaggcgctctgtgggggcggcctcgacctccccgccgttcctccccgcggacaccagacccggggccgacgcgcgggcaggacagcttctctctcggggccgggatgcgctgacacctcggtccaacctgtttttccggggtggtgacctcgaccgaagacgggcgactgtgctcccggggataccagcccccgggctcgttcaaggagggaggaaggaagggctcccatcgtgtttgcgcaggagtgagttttatttgctgcatctgcgggcggcacaggccgagggagacagcgagggggaagcgggggcggggctgaactttgacccagcgcacggtgcccgtgacgtcgctgtgcagagcccgcccccgagcgcccgag

SEQ ID NO: 34 - DNA, 582 bp, Homo sapiens
  misc_feature (1)..(582): n = a, t, g, or c
ggcacgagtctgaatgacgttacaccctcaccttcttttcctggccctgtctctggactctcccctgtgaggcccaattccaagacagactctcgtcctcaccgaagcttaggcccacatctcccaggctgcttaggagacagaatggaaacggaggccgcccctgccagccgccctggcctggtcactgcatgatccgctctggtcaaacccttccaggccagccagagtggggatggtctgtgactgctgggaaggcaggctgatggggcacacccttggcctctcgtccacgaggggagaaacctaaaccctgtttcacaatctgtgcggaagtagcttgcctcacttctgcttaggaaagcggctgttgctccataactctaaccagcacagggctgaggctgcagtgcacanntgcagggaggcccttcccaaggtgtggtgactgtgccttactgtacatgctcggaggnctggncattataaggagggttgggtgatgctgaaatcancccgatctttaagtaattaatttctggagtaatcaaggtggaaatccatagacaaattgaaaaaaaa

SEQ ID NO: 35 - DNA, 640 bp, Homo sapiens
  misc_feature (1)..(640): n = a, t, g, or c
ttttttttttttttttggcctttcaaagctttattcatagttcggaggccccgtgtgccccacttcccagacacccaggtctcggcgcccacacaggccccactgagtggtcctgtgtgtccacccgggaagcaccaggttgcccaccctccgaggctgggcagatggctggccagggcctcgaagaaggttccagaggtggccctcatgtggttccagctggccgaggtcacgaggagggacgcaggccccagccctgtgagggtctgggtggctcagtcgtgtggggctgcactcaggagcccccactgcagcgcaaggagggcccgcgcctgtggctgccgcggctcgcccgcctgttcgaagcgcgcccgctccttgcatagcgcctccaggacgtcggcggggaccgccttgcccgtgaacttgcgcaccggctcctctgccacccgcagggaaggggtgtagaggcgctcctcgcccagagtcgacggcacagtgggcacgtcatcctcatccctcttcttagcccaggacagcttggcttctcaacgtggtcgtgcangggctccactttctggccaaacctcaggtggcttaacgtgtgctcgtggccgcagaacacccttcgtctcggggg

SEQ ID NO: 36 - DNA, 944 bp, Homo sapiens
  misc_feature (1)..(944): n = a, t, g, or c
agtttatttcaaatctgcctccaagtccatgtgttctgaaaaggacagagggggcttggagtgcagccagatggaaggcctttgaaggctgtccaagtgctgctttcagagtgcaccaagtttttattgtccctgactgtggctccctgcctgtttgtcaggcgggagcctggnagcctgcacagggacagagctggtttcatccggcactccctagccctggacaccctccttgtctcgcctgccctcctgcaggccttcactctcccctgaggctgtcctggcccggactgtggggagcacctccaccccccggagcaggtgcacacccaggtaagcaggtccaggggctggggtgggcagggctagcttttggrtcctgagtgtcactactctctcctcccagggatgccctggacctaagtgacatcaactcagagcctcctcggggctccttcccctcctttgagcctcggaacctcctcagcctgtttgaggacaccctagacccaacctgagccccagactctgcctctgcacttttaaccttttatcctgtgtctctcccgtcgcccttgaaagctggggcccctcgggaactcccatggtcttctctgcctggccgtgtctaataaaaagtatttgaaccttgggagcacccaagcttgctcatgtggcaacatggcccttcctgtccctttattgatgtcatccagggtcttaacgcccctgaggctgagccctgctgcagaacccagcgctcctggccttgggcagcagctgaagccccatgctgtgtggagcaaagaggtttcctgagcaggcacatccccccggtgggtacctgggagctgttggggagtatggcactcaaggkggagggcaggcacggcccagggggtcccaggatctgaggscgctgagctccctgtgtcagtttcctg

SEQ ID NO: 37 - DNA, 580 bp, Homo sapiens
gcgatctagaatgcagcgacgctgagctgctcctggccgcatgcaccagcgacttcggtgagtgtccccgccatggggggagcctggagcctgccttcccctgaatgcctaccgcagccacatgcctccccacagtaattcacgggatcatccatggggtcacccatgacgtggagctgcaggagtctgtcatcactgtggtggccgcccgtgtcctccgccagacaccgccgctgttccaggcggggcgatccggggaccagggctgacctccattcgtaccccactgcgctgtggcgtccacccgggcccaggcaccttcctcttcatgggctggagccgcttggggaggcccggctgggctgtgccccacgattccaggagttccgccgtgcctacgaggctgcccgtgctgcccacctccacccctgcgaggtggcgctgcactgaggggctgggtgctggggaggggctggtaggagggagggtgggcccactgctttggaggtgatgggactatcaataagaactctgttcacgcaaaaaaaaaaaaaaggggcggcctcgcggatctaagaac

SEQ ID NO: 38 - DNA, 344 bp, Homo sapiens
  misc_feature (1)..(344): n = a, t, g, or c
tttgtttttacaacttttttaatatatatttttataaacaggtcacgtgataaaatagcacaagaaacacttaccaaatataaggttatatcttccgcatatacaggagaatgaggtcgttatgtacaataagaaaatgattttaggggttggttggtttttgttttcctctctccccttaatttttcctcctacaggtcgttggaaatatcacagctttcagttgcattaatactttgggcaaatggacagtgcctcccccgngnnnnnggggggggggaggggggggtnntgaaaaaactggctcctgaccactcaaccctggagctttctggggctggcac

SEQ ID NO: 39 - DNA, 773 bp, Homo sapiens
tttttttttttttttttttttttttttttttttttttttttgcctctgctttcatttttatggttattcggggaaggactttttgaccacccggagaaggcaaaacttcagccatttgggtttttttccccttggccttcccccctttcccaggaaggccgacttgttcattttgtttttccttggcttcaacagcccccaatttttcaataaagggagccaagtcttttttccacaaatctgagggactctttttttttaagggggccagctcttggtctttttcatttcttagccggcaaaggtcatcttttttttccttggttaaataccaaaggggcatatcaagaaaatagttgaagggtggcccaaaatctgttacggagtcactcttttcagtttccttttcgggggcactctcttcattttcttcttcatctggaaccttttgctgggcttttttccaggccttcacaggatccgaatcatatcccctctgaatcaaaactttaattaattctttcttaggcttattttcaaggattattttgccatctattttctctaagaaaaagcgagcctgattattcagtttagcagattcagcaccaagcattcctaggagccattcttttcttaatccataatatttaaggctgaggtcaaaaaaaggctcttagaaatcccacaccgggtcatatttctttaaaccgcctacgtgtcaaaaagcaccatagagttgatggggagactagtttggagtttgaaaactt

SEQ ID NO: 40 - DNA, 447 bp, Homo sapiens
ttttaacttttattaatctttattttaaaacataaccagatgcaccttggttgtttacattctctggttgccattcagtctcaaagtaaacactgggagcatatgataaatcgtagtttaaggaagccatagcacttacagagttctcaaatggttacaatataaaatctgtcataaaaatcagtaaaatatgcaaggtagaacacattttaacactggtacaatggcagtagcagctttgcaaatgtttgtctatatgatttccacaggactttttttttttgcctggcctcattatgtagcaaagcattttttcttttctttttgagatggagtcttgctctgttacccagcaggctggagtgcagtggtataaacacagctcactgcagcctcaacctcccgggctcaagtgattcttccacctcagtctcctgagtagctggt

SEQ ID NO: 41 - DNA, 1107 bp, Homo sapiens
attttattaaagtacaaaattsttggcatttagctaatagaaaaacatagtaaatatttacaaaaacgttgataacattactcaagtcacacacatataacaatgtagacaggtcttaacaaagtttacaaattgaaattatggagatttcccaaaatgaatctaatagctcattgctgagcatggttatcaatataacatttaagatcttggatcaaatgttgtccccgagtcttctgcaatccagtcctcttagaaattggtttctctctttgggagattcagactcagaggcagccagaggggacaggtcaagagctgaaataatcacataactactctaattttcttcattctattgactgtgtcaagttatagacacagccaaagtgtttttcttcggcctctgatgatttgagaagatgaagaacatgagcaatttctcattgcttaaagaaaaacttggcacataagaggctgagtgtagtagagtatctgtactagaaccataaagttctatctgatggtaaattatgtataaaactaagataaaacagataattatgctctatctcatatctactgaaagtagaaaaggaggaagagtgacacttttaaatcaaactgctctagttttagcttagtggatggttaataaacacactgctttacgctgaagtgatcagatagctatttctacagttcagaagaacttaaaaatcaggttttaaagacaaaagaaagcagactcaaaacacagacaaagcagagaagaaaacaatgcccatgagatggtcactatttagacagtattataaaaagctaaagaacacttgggctttacttcactttgatgtcttgtactaaaaacaccttccccaaactaaattcagagggggggragttaagagcttcaggtaactttaaaaccagtcttgggcttggtaagataatwacttaaaawaatcgcctcacattttaaaacagatcatcttcatctgactcttccaggtactttataggtttctttgcccgtacaggwtttgcccgagggagccacagctgagtcaaagtccatatgggagtmgacactctcccctctggatt

SEQ ID NO: 42 - DNA, 482 bp, Homo sapiens
tttttttttttatgtacactaatgtttgtatcagcagatttataatagccgaagaagcaacatagatggccgtcaatggacacatggataaacggggaatatttggccatggaaaaaaatgaaatataggttgagcattcctaatccccaaatccaaaatactacaaaatccaaactttttgagtataatgatgccacaagtgaaaaattcaacatacaaatacttaatacaaactttgtctcatgcacaaaattgttaaaaatattgtataaaattaccttcaggctatgtgtataagatgtatatgaaacaagtgaattttgtggttagactctgggtcccatctggaagacatctcattatgtaaatgcaaatattccaaaatttgaaaacatctgaaatccaaaacacttctggtctcaagcattttgggtaaggaatacttaacgtaaacggacacaagctacaatatggatggact

SEQ ID NO: 43 - DNA, 462 bp, Homo sapiens
ttttttaaaaatgtttttatttaattaaaaaaaagacagaacaaccaacccaaaaccagtagtaggtactggagtcacaggtgcttaactggcgaaacacacaggggtgggggcgagggggcgggtcgggaggagggagagaaggtgggcacaggccaccacatccccccgttgggtgtcaggtctgagatgcagcgggagggccaggaatgggcggcccagggcccagggtccccggagacccagctggccgcggggagaaggctgagaaggcccgggtgtctgaggtggttttgctcccggctcgtccccttcttcctactctttcttggtccctaggtgggccctgcttactctgcagccccgggtccggtctcccagcacaaccttcgtgcaaagccagcccacgccacctctggaggccagggagggctgcatttggctttagttcattgttcgtcg

SEQ ID NO: 44 - DNA, 1982 bp, Homo sapiens
ggcgagaggcgggctgaggcggcccagcggcggcaggtgaggcggaaccaaccctcctggccatgggaggggccgtggtggacgagggccccacaggcgtcaaggcccctgacggcggctggggctgggccgtgctcttcggctgtttcgtcatcactggcttctcctacgccttccccaaggccgtcagtgtcttcttcaaggagctcatacaggagtttgggatcggctacagcgacacagcctggatctcctccatcctgctggccatgctctacgggacaggtccgctctgcagtgtgtgcgtgaaccgctttggctgccggcccgtcatgcttgtggggggtctctttgcgtcgctgggcatggtggctgcgtccttttgccggagcatcatccaggtctacctcaccactggggtcatcacggggttgggtttggcactcaacttccagccctcgctcatcatgctgaaccgctacttcagcaagcggcgccccatggccaacgggctggcggcagcaggtagccctgtcttcctgtgtgccctgagcccgctggggcagctgctgcaggaccgctacggctggcggggcggcttcctcatcctgggcggcctgctgctcaactgctgcgtgtgtgccgcactcatgaggcccctggtggtcacggcccagccgggctcggggccgccgcgaccctcccggcgcctgctagacctgagcgtcttccgggaccgcggctttgtgctttacgccgtggccgcctcggtcatggtgctggggctcttcgtcccgcccgtgttcgtggtgagctacgccaaggacctgggcgtgcccgacaccaaggccgccttcctgctcaccatcctgggcttcattgacatcttcgcgcggccggccgcgggcttcgtggcggggcttgggaaggtgcggccctactccgtctacctcttcagcttctccatgttcttcaacggcctcgcggacctggcgggctctacggcgggcgactacggcggcctcgtggtcttctgcatcttctttggcatctcctacggcatggtgggggccctgcagttcgaggtgctcatggccatcgtgggcacccacaagttctccagtgccattggcctggtgctgctgatggaggcggtggccgtgctcgtcgggcccccttcgggaggcaaactcctggatgcgacccacgtctacatgtacgtgttcatcctggcgggggccgaggtgctcacctcctccctgattttgctgctgggcaacttcttctgcattaggaagaagcccaaagagccacagcctgaggtggcggccgcggaggaggagaagctccacaagcctcctgcagactcgggggtggacttgcgggaggtggagcatttcctgaaggctgagcctgagaaaaacggggaggtggttcacaccccggaaacaagtgtctgagtggctgggcggggccggcaggcacagggaggaggtacagaagccggcaacgcttgctatttattttacaaactggactggctcaggcagggccacggctgggctccagctgccggcccagcggatcgtcgcccgatcagtgttttgagggggaaggtggcggggtgggaaccgtgtcattccagagtggatctgcggtgaagccaagccgcaaggttacaaggcatcctcaccaggggccccgcctgctgctcccaggtggcctgcggccactgctatgctcaaggacctggaaacccatgcttcgagacaacgtgactttaatgggagggtgggtgggccgcagacaggctggcagggcaggtgctgcgtggggccctctccagcccgtcctaccctgggctcacatggggcctgtgcccacccctcttgagtgtcttggggacagctctttccacccctggaagatggaaataaacctgcgtgtgggtggagtgttctcgtgccgaattcaaaaagctt

SEQ ID NO: 45 - DNA, 599 bp, Homo sapiens
tactttcattagtgttttcaatagtgtgggcgcaggctcagaaggtggagaggctggcctcagaggacacccaggcttggggctaagtcccagtgtccatatgaagctgtttctggccttgtccgtttttgttgtcccaggctctgtgcccctcactcagtcaagaacttgtctttgtgttgcttcttggggacatgctcagggcagaagtcagagcggaggaggcgggaaaagtagattatgatcatcacgtccagcatgagcaggatacccagcaggaaggtgcccagggtcctctggttcacataacgcaagaagaaatgggtgaggtaggcctgaggggccaggcggaagagaaagtacatgaccaggttcacatacttgttaacccggtagaggagatgatcctgggcattactgattttcatcatcatgcgaatggtgaggaagatgttgctgacttccaccagtagtgttaagacacccgcaccgacaaagctgctccaaaagatgccggagaagaaggcacccatggccatgacgtgatggacaaggtatttccaagatgctcgcgtctgttcgctagccacgatgtccac

SEQ ID NO: 46 - DNA, 347 bp, Homo sapiens
tacataaagtgcttctttttaatgaaacaaatccaagagatgtacagtcaggctcaagttgtgcagttcacaagcatggaggaaacagacagaacgacagcgttcaggacagtcagagctaacccaagacgaggctggacttgccgccagagggatttcttctggatggcactggggccggggcaccgggcttgggcacaggcgcacaggcacgggcttctcttcactctgccccaggctgcctggcaagtctgtgtccacattttcatgaatatcaccttctcccttcagatctaagaagtctccggagcttgcttcagaggagttccttctctgcagtccagatg

SEQ ID NO: 47 - DNA, 1421 bp, Homo sapiens
acttactgcgggacggccttggagagtactcgggttcgtgaacttcccggaggcgcaatgagctgcattaacctgcccactgtgctgcccggctcccccagcaagacccgggggcagatccaggtgattctcgggccgatgttctcaggaaaaagcacagagttgatgagacgcgtccgtcgcttccagattgctcagtacaagtgcctggtgatcaagtatgccaaagacactcgctacagcagcagcttctgcacacatgaccggaacaccatggaggcgctgcccgcctgcctgctccgagacgtggcccaggaggccctgggcgtggctgtcataggcatcgacgaggggcagtttttccctgacatcatggagttctgcgaggccatggccaacgccgggaagaccgtaattgtggctgcactggatgggaccttccagaggaagccatttggggccatcctgaacctggtgccgctggccgagagcgtggtgaagctgacggcggtgtgcatggagtgcttccgggaagccgcctataccaagaggctcggcacagagaaggaggtcgaggtgattgggggagcagacaagtaccactccgtgtgtcggctctgctacttcaagaaggcctcaggccagcctgccgggccggacaacaaagagaactgcccagtgccaggaaagccaggggaagccgtggctgccaggaagctctttgccccacagcagattctgcaatgcagccctgccaactgagggacctgcaagggccgcccgctcccttcctgccactgccgcctactggacgctgccctgcatgctgcccagccactccaggaggaagtcgggaggcgtggagggtgaccacaccttggccttctgggaactctcctttgtgtggctgccccacctgccgcatgctccctcctctcctacccactggtctgcttaaagcttccctctcagctgctgggacgatcgcccaggctggagctggccccgcttggtggcctgggatctggcacactccctctccttggggtgagggacagagccccacgctgttgacatcagcctgcttcttcccctctgcggctttcactgctgagtttctgttctccctgggaagcctgtgccagcacctttgagccttggcccacactgaggcttaggcctctctgcctgggatgggctcccaccctcccctgaggatggcctggattcacgccctcttgtttccttttgggctcaaagcccttcctacctctggtgatggtttccacaggaacaacagcatctttcaccaagatgggtggcaccaaccttgctgggacttggatcccaggggcttatctcttcaagtgtggagagggcagggtccacgcctctgctgtagcttatgaaattaactaatt

SEQ ID NO: 48 - DNA, 995 bp, Homo sapiens
taaaatgtgaggcgattattttaagtaattatcttaccaagcccaagactggttttaaagttacctgaagctcttaacttcctcccctctgaatttagtttggggaaggtgtttttagtacaagacatcaaagtgaagtaaagcccaagtgttctttagctttttataatactgtctaaatagtgaccatctcatgggcattgttttcttctctgctttgtctgtgttttgagtctgctttcttttgtctttaaaacctgatttttaagttcttctgaactgtagaaatagctatctgatcacttcagcgtaaagcagtgtgtttattaaccatccactaagctaaaactagagcagtttgatttaaaagtgtcactcttcctccttttctactttcagtagatatgagatagagcataattatctgttttatcttagttttatacataatttaccatcagatagaactttatggttctagtacagatactctactacactcagcctcttatgtgccaagtttttctttaagcaatgagaaattgctcatgttcttcatcttctcaaatcatcagaggccaaagaaaaacactttggctgtgtctataacttgacacagtcaatagaatgaagaaaattagagtagttatgtgattatttcagctcttgacctgtcccctctggctgcctctgagtctgaatctcccaaagagagaaaccaatttctaagaggactggattgcagaagactcggggacaacatttgatccaagatcttaaatgttatattgataaccatgctcagcaatgagctattagattcattttgggaaatctccataatttcaatttgtaaactttgttaagacctgtctacattgttatatgtgtgtgacttgagtaatgttatcaacgtttttgtaaatatttactatgtttttctattagctaaattccaacaattttgtactttaataaaatgttctaaacattgc

SEQ ID NO: 49 - DNA, 2295 bp, Homo sapiens
ggcacgaggggaggcaaacgcacgcgggaagagctgctacccattccagggaccctgccgctgcccctctgaggggtctgcacctcctgggagcaggtgggtctctgggacgagggtccatggtggatggctctggagacgctcccgaggctgtgccgtccccctgctgcacaggtcggagggtcaccgcagaggctactcgggctggggctggggccgagggagcccgcactggagccccatgtggaacccaaggatgcagctgctctgctaacacggcagcccatccttcgagactgtgacctcgccacagtggccctcagccctccacctccggcgggggcgagggccacccacctccaagtctccagccatgacgacctccgcactccggcgccaggtgaagaacatcgtgcacaactactccgaggcagaaatcaaggtgcgcgaggccaccagcaatgacccctggggcccccctagttcgctcatgtccgagatcgctgacctgaccttcaacacagtggccttcaccgaagtcatgggcatgctgtggcggcggctcaatgacagcggcaagaactggcggcacgtgtacaaggctctaacattgctggactacctgctcaagacgggctccgagcgggtggcccaccagtgccgcgagaacctctacaccatccagacactcaaggacttccagtacatcgaccgcgacggcaaggaccagggcgtcaacgtgcgcgagaaggtcaagcaggtgatggccctgctcaaggatgaggagcggctgcggcaggagcgaacccacgccctcaagaccaaggagcgcatggcactggagggcatcggcattggcagtgggcagctgggcttcagccgccgctacggcgaggactacagccgctcccggggctccccgtcctcctacaactgcccggcctcagacgtcaggggaagaggaactgcagctgcagctggccctcgccatgagccgtgaggaggcagagaaggaggtgaggtcctggcagggtgatggctcccccatggccaatggtgcaggggccgtggtccaccatcagcgggacagagagcctgagagagaagagagaaaggaggaggagaagctaaaaaccagccaggttttaggccgaacacagaggccagtggatcctcctgggggccttctgcagacccctggtctccgatcccctcaggaaccgtcctgtcccgaagccagccctgggatccgactcccatgctctcctcctctgagccctggggcaggaccccagtgctgcctgctgggccccccaccacagacccctgggccctgaactctccccaccacaaactccccagcactggggctgacccttggggagcctccctggagacctccgacacacctggtggtgcctcgacctttgacccatttgccaaacctccagaatccacagagaccaaggaggggctggagcaggccctgccctctgggaagcccagcagccctgtggagctggacctgtttggagaccccagccccagttccaagcaaaatggcacgaaggagccagatgccctggacctgggcatactaggggaagcactaacccagccaagcaaagaggcccgagcttgccggactcccgagtccttcctgggtccctcagcttcctccttggtcaaccttgactcgttggtcaaggcaccccaggttgcaaagacccggaaccccttcctgacaggtctcagcgctccgtcccccaccaacccgttcggcgcgggcgagacgggcaggccgacgctaaaccagatgcgcaccggctcgccggcgctgggcctggcaggcgggcctgtgggggcgcccctgggctccatgacctacagcgcctctctgcccctcccgctcagcagcgtgccagctggcttgaccctccccgcctcggttagcgtcttcccgcaggccggagccttcgcaccgcagccgctgctgcccacgccgagctcagccgggccgcggcccccgcccccgcagaccggcaccaaccccttcctctgagccccgccccgtcccataccggcctgcgcctgcgccggacgctccgcggccccgcctccggacccggggctgggcggggcgccggtgctagtggaacgccgagccagtggcggctggtatcccgcggcggctctggaagctggacgcggaccacggcccgggagctagaaactgaacgcccgcataataaagactggaaccctcgttaaaaaaaaaaaaaaaaaaaaaaaaaa

SEQ ID NO: 50 - DNA, 1976 bp, Homo sapiens
gccacacggtctttgagctgagtcgaggtggaccctttgaacgcagtcgccctacagccgctgattccccccgcatcgcctcccgtggaagcccaggcccgcttcgcagctttctccctttgtctcataaccatgtccaccaacgagaatgctaatacaccagctgcccgtcttcacagattcaagaacaagggaaaagacagtacagaaatgaggcgtcgcagaatagaggtcaatgtggagctgaggaaagctaagaaggatgaccagatgctgaagaggagaaatgtaagctcatttcctgatgatgctacttctccgctgcaggaaaaccgcaacaaccagggcactgtaaattggtctgttgatgacattgtcaaaggcataaatagcagcaatgtggaaaatcagctccaagctactcaagctgccaggaaactactttccagagaaaaacagccccccatagacaacataatccgggctggtttgattccgaaatttgtgtccttcttgggcagaactgattgtagtcccattcagtttgaatctgcttgggcactcactaacattgcttctgggacatcagaacaaaccaaggctgtggtagatggaggtgccatcccagcattcatttctctgttggcatctccccatgctcacatcagtgaacaagctgtctgggctctaggaaacattgcaggtgatggctcagtgttccgagacttggttattaagtacggtgcagttgacccactgttggctctccttgcagttcctgatatgtcatctttagcatgtggctacttacgtaatcttacctggacactttctaatctttgccgcaacaagaatcctgcacccccgatagatgctgttgagcagattcttcctaccttagttcggctcctgcatcatgatgatccagaagtgttagcagatacctgctgggctatttcctaccttactgatggtccaaatgaacgaattggcatggtggtgaaaacaggagttgtgccccaacttgtgaagcttctaggagcttctgaattgccaattgtgactcctgccctaagagccatagggaatattgtcactggtacagatgaacagactcaggttgtgattgatgcaggagcactcgccgtctttcccagcctgctcaccaaccccaaaactaacattcagaaggaagctacgtggacaatgtcaaacatcacagccggccgccaggaccagatacagcaagttgtgaatcatggattagtcccattccttgtcagtgttctctctaaggcagattttaagacacaaaaggaagctgtgtgggccgtgaccaactataccagtggtggaacagttgaacagattgtgtaccttgttcactgtggcataatagaaccgttgatgaacctcttaactgcaaaagataccaagattattctggttatcctggatgccatttcaaatatctttcaggctgctgagaaactaggtgaaactgagaaacttagtataatgattgaagaatgtggaggcttagacaaaattgaagctctacaaaaccatgaaaatgagtctgtgtataaggcttcgttaagcttaattgagaagtatttctctgtagaggaagaggaagatcaaaacgttgtaccagaaactacctctgaaggctacactttccaagttcaggatggggctcctgggacctttaacttttagatcatgtagctgagacataaatttgttgtgtactacgtttggtattttgtcttattgtttctctactaagaactctttcttaaatgtggtttgttactgtagcactttttacactgaaactatacttgaacagttccaactgtacatacatactgtatgaagcttgtcctctgactaggtttctaatttctatgtggaatttcctatcttgcagcatcctgtaaataaacattcaagtccacccttaaaaaaaa

SEQ ID NO: 51 - DNA, 704 bp, Homo sapiens
tattttagcaaattggagaaattagagaatgtatggtcatgagagatcccactacgaaacgctccagaggcttcggtttcgtcacgttcgcagacccagcaagtgtagataaagtattaggtcagccccaccatgagttagattccaagacgatgaccccaaagttgcatttcctcgtcgagcgcaacccaaggtgttctagctgagcgtttaagagcatggactctggaaccagactttgaatccttgctctgccactgcagctgtgtgaccttgagacaagctatctaaatattctgtgcctttgttttgtcatctgtacaatggagatgatgatggtatcaccttcatggggttgtcataaggattatgggacttaacataataaagtgtttagaatggaaaaaaaagaaaaaaaaaaaaaggggaagaaaaaaaagaaaattttaaaaaaaaaagtcaagccgcacacaacgctcgtggtcgggccgacgcgagcaccccaggagaaaggtctccacaaccaacgtcggggcggggggcggccccgagtgtgatcaccaaccgtgccacagcggctccagagaaaacacgcgcggcgacaaaggggggggctccccacaaaaacccgcggcgaacccgcgtggtgcaaccaccgcagagtgcgggcgcaggcatccagagggccaggacggatataccag

SEQ ID NO: 52 - DNA, 2150 bp, Homo sapiens
ctcgagccacgaaggccccgctgtcctgtctagcagatacttgcacggtttacagaaattcggtccctgggtcgtgtcaggaaactggaaaaaaggtcataagcatgaagcgcagttcagtttccagcggtggtgctggccgcctctccatgcaggagttaagatcccaggatgtaaataaacaaggcctctatacccctcaaaccaaagagaaaccaacctttggaaagttgagtataaacaaaccgacatctgaaagaaaagtctcgctatttggcaaaagaactagtggacatggatcccggaatagtcaacttggtatattttccagttctgagaaaatcaaggacccgagaccacttaatgacaaagcattcattcagcagtgtattcgacaactctgtgagtttcttacagaaaatggttatgcacataatgtgtccatgaaatctctacaagctccctctgttaaagacttcctgaagatcttcacatttctttatggcttcctgtgcccctcatacgaacttcctgacacaaagtttgaagaagaggttccaagaatctttaaagaccttgggtatccttttgcactatccaaaagctccatgtacacagtgggggctcctcatacatggcctcacattgtggcagccttagtttggctaatagactgcatcaagatacatactgccatgaaagaaagctcacctttatttgatgatgggcagccttggggagaagaaactgaagatggaattatgcataataagttgtttttggactacaccataaaatgctatgagagttttatgagtggtgccgacagctttgatgagatgaatgcagagctgcagtcaaaactgaaggatttatttaatgtggatgcttttaagctggaatcattagaagcaaaaaacagagcattgaatgaacagattgcaagattggaacaagaaagagaaaaagaaccgaatcgtctagagtcgttgagaaaactgaaggcttccttacaaggagatgttcaaaagtatcaggcatacatgagcaatttggagtctcattcagccattcttgaccagaaattaaatggtctcaatgaggaaattgctagagtagaactagaatgtgaaacaataaaacaggagaacactcgactacagaatatcattgacaaccagaagtactcagttgcagacattgagcgaataaatcatgaaagaaatgaattgcagcagactattaataaattaaccaaggacctggaagctgaacaacagaagttgtggaatgaggagttaaaatatgccagaggcaaagaagcgattgaaacacaattagcagagtatcacaaattggctagaaaattaaaacttattcctaaaggtgctgagaattccaaaggttatgactttgaaattaagtttaatcccgaggctggtgccaactgccttgtcaaatacagggctcaagtttatgtacctcttaaggaactcctgaatgaaactgaagaagaaattaataaagccctaaataaaaaaatgggtttggaggatactttagaacaattgaatgcaatgataacagaaagcaagagaagtgtgagaactctgaaagaagaagttcaaaagctggatgatctttaccaacaaaaaattaaggaagcagaggaagaggatgaaaaatgtgccagtgagcttgagtccttggagaaacacaagcacctgctagaaagtactgttaaccaggggctcagtgaagctatgaatgaattagatgctgttcagcgggaataccaactagttgtgcaaaccacgactgaagaaagacgaaaagtgggaaataacttgcaacgtctgttagagatggttgctacacatgttgggtctgtagagaaacatcttgaggagcagattgctaaagttgatagagaatatgaagaatgcatgtcagaagatctctcggaaaatattaaagagattagagataagtatgagaagaaagctactctaattaagtcttctgaagaatgaagataaaatgttgatcatgtatatatatccatagtgaataaaattgtctcagtaaaaaaaaaaaaaaaaaaaaaaaaaaaaaaaaaaaaaaaaaaaaaaaaaaaaaaaaaaaaaaaa

SEQ ID NO: 53 - DNA, 463 bp, Homo sapiens
tttcacttggctaattcttttatttttttaaatagggatgacatttctccatgtttgtcaggccttggactctctacgtcaggtgatccatccacccacctcggcctcccaaagtgctgggatcacaggtgtgagccactgcgcctgacccttgcaggtacttcttaaagctatggggttttcccagagcttggtagcatgtgtgttcaaagggctatcaatgttgagttgtcctagcaggcactggatagagagcaggatggtcctgatatcatacggggcagaccacttctccttcaggatgtccaggcatatgttaccctgggtgtccacgttagggtggtagcagggtgtgaggaacttcactgtgggtgcatcgtaaaggtgggtagtcattgaggaactccagcaagagcttatacctcagatcttcatacactgtagcagctgcttcatggatggt

SEQ ID NO: 54 - DNA, 521 bp, Homo sapiens
gacataagaacagttttattttaatcacttaagacttgtgcattattcaattttgagactgaaatacttgtttccctttcaactgattaggaaatggtctgagctggcagaagttaatcctcacattattcagctaatgagagacagaatcctaaaacctgattccaacttccgcctgtacctcacaatgcaagacaaagcctttcattttaatgttgtacacatataaggaccatataatctggattaactttaggtaacaataacttaaaagataggaaaatgtatcatattacagagatttaaaaattgtctatacaataaatgatgaagaaaactaacaataaacaggacgacgttcaaatactgaatacaattaacaaatggggccaaaagatcaacatttatctctcatcatctttcatgcaatgtctcagctttcttctcccaaacataaaggcagattaattcaaagtagccctattaagaatatttgtttatcacgcctgcaatcccagcac

SEQ ID NO: 55 - DNA, 1388 bp, Homo sapiens
gcggacttctgccaagcaccggctcatgtgaggctcgcggcacagcgttctctgggctccccagaagccagcctttcgctcccggacccggcagcccgagcaggagccgtgggaccgggcgccagcaccctctgcggcgtgtcatgggcccgcgccgccggagccgaaagcccgaggccccgaggaggcgcagcccgagcccgaccccgacccccggcccctcccggcggggcccctccttaggcgcttcctcccatcaacacagtcggcggagacaaggttggctaaaggagatccgaaagcttcagaagagcacacacctcttgataaggaagctgcccttcagccgcctggcaagagaaatatgtgttaaattcactcgtggtgtggacttcaattggcaagcccaggccctattggccctacaagaggcagcagaagcatttctagttcatctctttgaggacgcctatctcctcaccttacatgcaggccgagttactctcttcccaaaggatgtgcaactggcccggaggatccggggccttgaggagggactcggctgagctcctgcacccagtgtttctgtcagtctttcctgctcagccaggggggatgataccggggactctccagagccatgactagatccaatggattctgcgatgctgtctggactttgctgtctctgaacagtatgtgtgtgttgctttaaatatttttcttttttttgagaaggagaagactgcatgactttcctctgtaacagaggtaatatatgagacaatcaacaccgttccaaaggcctgaaaataattttcagataaagagactccaaggttgactttagtttgtgagttactcatgtgactatttgaggattttgaaaacatcagatttgctgtggtatgggagaaaaggttatgtacttattattttagctctttctgtaatatttacattttttaccatatgtacatttgtacttttattttacacataagggaaaaaataagaccactttgagcagttgcctggaaggctgggcatttccatcatatagacctctgcccttcagagtagcctcaccattagtggcagcatcatgtaactgagtggactgtgcttgtcaacggatgtgtagcttttcagaaacttaattggggatgaatagaaaacctgtaagctttgatgttctggttacttctagtaaattcctgtcaaaatcaattcagaaattctaacttggagaatttaacattttactcttgtaaatcatagaagatgtatcataacagttcagaattttaaagtacattttcgatgcttttatgggtatttttgtagtttctttgtagagagataataaaaatcaaaatatttaatga

SEQ ID NO: 56 - DNA, 538 bp, Homo sapiens
  misc_feature (1)..(538): n = a, t, g, or c
gtgcaacagttttagataaacaacacatttcaagtccagaattaaattgcaataatgagataaatggtcatactaatgaaacaaatactgaaatgcaaagaaataaacaggatcttcctggcttatcttctgagtctgccagagaacctaatgcagagtgcatgaatcaaattgaggataatgatgactttcaattgcagaaaactgtgtatgatgctgacatggatttaactgctagtgaagtcagcaaaattgtcacagtctcaacaggcattaaaaagaaaagtaataaaaaaacaaatgaacatggaatgaaaactttcagaaaagtgaaagattccagctctgaaaaaaagagagaaagatcaaagagacagtttaaaaatagttcagatgtcgatattggggaaaagattgaaaacaggacagaaagatctgatgtcctgganggcaaaaggggtgcagaagatcccggttttattttcaacaatgagcagctggctcagatgaacgaacagctggctcaggtgaangaact

SEQ ID NO: 57 - DNA, 467 bp, Homo sapiens
tttttttttttttttttttttttttgagggaaagacaaaacgtatttattccaggccaggtcttaaaatgcacactgcacggttccctgttgttaacagccccataaggaaagaacgtgccttaacggcagccccacccagagcctgctgcgtggctgctgtgaggctccccatgaatccacgcagtcttcttcctcactggtgcagttggtgaggttttctaccctcacagcaaagggatccttaactataaattcacggtatgcagagaagaggacagaatctgatttactgattgttcctcatttaaaccatggctgaaatctctaccttagggtttaactatctttattttacgggtaaaatttataaaaaaaattgggaaaagggttaacagtcctaaagggggcatatggcataagggtttacacagtggactgacacgagggttaaattccggtcagagg

SEQ ID NO: 58 - DNA, 522 bp, Homo sapiens
ggtcgaccacatcgcgcccctagagagcgcagcaactggagcaaagagaaggataaacagaaaggacaccctctctagggtccccagggggccggggctggggctgcgtaggtgaaaaggcagaacactccgcgcttcttagaagaggagtgagaggaaggccgggggcggacaacgcatcgtgttggcctcccctcccactcgcgtgtgtataattattacatgtgatggcctggctggatgcacaagctaggaggagcgtggagtaagagaaagaagggttttgccctaaattgggtcgtagtaacattttcggctcggccgcgattgttggagtagtagtgacccggggattccggaacggttaccggaggctgaacggctttcccagtggtgggtggtgttgaagcttgggtagagcatggggctagatgtgtgccgtggtggaattgttgtcgcgccccattccgggaaacattgagccggtagataaaggggaaacccgggtggctgattattggg

SEQ ID NO: 59 - DNA, 783 bp, Homo sapiens
ggcacgagcgagttcctgtctctctgccaacgccgcccggatggcttcccaaaaccgcgacccagccgccactagcgtcgccgccgcccgtaaaggagctgagccgagcgggggcgccgcccggggtccggtgggcaaaaggctacagcaggagctgatgaccctcatgatgtctggcgataaagggatttctgccttccctgaatcagacaaccttttcaaatgggtagggaccatccatggagcagctggaacagtatatgaagacctgaggtataagctctcgctagagttccccagtggctacccttacaatgcgcccacagtgaagttcctcacgccctgctatcaccccaacgtggacacccagggtaacatatgcctggacatcctgaaggaaaagtggtctgccctgtatgatgtcaggaccattctgctctccatccagagccttctaggagaacccaacattgatagtcccttgaacacacatgctgccgagctctggaaaaaccccacagcttttaagaagtacctgcaagaaacctactcaaagcaggtcaccagccaggagccctgacccaggctgcccagcctgtccttgtgtcgtctttttaatttttccttagatggtctgtcctttttgtgatttctgtataggactctttatcttgagctgtggtatttttgttttgtttttgtcttttaaattaagcctcggttgagcccttgtatattaaataaatgcatttttgtccttttttaaaaaaaaaaaaaaaaaaa

SEQ ID NO: 60 - DNA, 2813 bp, Homo sapiens
ctccaccgacagccaggcactgggcagcacgcactggagacccaggaccctgtgcaggagcagctccgggtgacacgaggggactgaagatactcccacaggggctcagcaggagcaatgggtaaccaaatgagtgttccccaaagagttgaagaccaagagaatgaaccagaagcagagacttaccaggacaacgcgtctgctctgaacggggttccagtggtggtgtcgacccacacagttcagcacttagaggaagtcgacttgggaataagtgtcaagacggataatgtggccacttcttcccccgagacaacggagataagtgctgttgcggatgccaacggaaagaatcttgggaaagaggccaaacccgaggcaccagctgctaaatctcgttttttcttgatgctctctcggcctgtaccaggacgtaccggagaccaagccgcagattcatcccttggatcagtgaagcttgatgtcagctccaataaagctccagcgaacaaagacccaagtgagagctggacacttccggtggcagctggaccggggcaggacacagataaaaccccagggcacgccccggcccaagacaaggtcctctctgccgccagggatcccacgcttctcccacctgagacagggggagcaggaggagaagctccctccaagcccaaggactccagcttttttgacaaattcttcaagctggacaagggacaggaaaaggtgccaggtgacagccaacaggaagccaagagggcagagcatcaagacaaggtggatgaggttcctggcttatcagggcagtccgatgatgtccctgcagggaaggacatagttgacggcaaggaaaaagaaggacaagaacttggaactgcggattgctctgtccctggggacccagaaggactggagactgcaaaggacgattcccaggcagcagctatagcagagaataataattccatcatgagtttctttaaaactctggtttcacctaacaaagctgaaacaaaaaaggacccagaagacacgggtgctgaaaagtcacccaccacttcagctgaccttaagtcagacaaagccaactttacatcccaggagacccaaggggctggcaagaattccaaaggatgcaacccatcggggcacacacagtccgtgacaacccctgaacctgcgaaggaaggcaccaaggagaaatcaggacccacctctctgcctctgggcaaactgttttggaaaaagtcagttaaagaggactcagtccccacaggtgcggaggagaatgtggtgtgtgagtcaccagtagagattataaagtccaaggaagtagaatcagccttacaaacagtggacctcaacgaaggagatgctgcacctgaacccacagaagcgaaactcaaaagagaagaaagcaaaccaagaacctctctgatggcgtttctcagacaaatgtcagtgaaaggggatggagggatcacccactcagaagaaataaatgggaaagactccagctgccaaacatcagactccacagaaaagactatcacaccgccagagcctgaaccaacaggagcaccacagaagggtaaagagggctcctcgaaggacaagaagtcagcagccgagatgaacaagcagaagagcaacaagcaggaagccaaagaaccagcccagtgcacagagcaggccacggtggacacgaactcactgcagaatggggacaagctccaaaagagacctgagaagcggcagcagtcccttgggggcttctttaaaggcctgggaccaaagcggatgttggatgctcaagtgcaaacagacccagtatccatcggaccagttggcaaacccaagtaaacaaatcagcacggttcccaccaggttctcctgccaccaagatgtgttctccttactccatctcctccccaaacacgctccatgtatatattcttctgatggccagcaaatgaaattctgcctagaaattaagcccgagctgttgtatattgaggtgtattatttacgtctctggtccagtcttttctggcaaataacagtaaagatggtttagcaggtcacctagttgggtcagaagagtcgatgatcaccaagcaggaaagggagggaatagaggaatgtgttcgggttaagtgatgaaaatggcagtggtggccgggcgtggtggctctcgcctgtaatctcagcactttgggaggccgaggcaggtggatcacctgaggtcaggagttcaagactagcctggccaacatcatgaaaccccgtctctactaaaaatacaaaaattagccaggcatggtggcacacacctgtagtcccagctactcgggagcccaacgcacgagaaccgcttgtacccaggaggtggaggttgcagtgagccgaagttgcaccattgcactccaccctgggcgacagagcaagattctatcaaaaaaaaaaggcagtggcaagtaagttatagaagagaaatgctgctagaaggaattaagcgttgtagtaaacgcgtgctcatcctctaagcttgaagaagggagacgaaaatccatttgtttaaattcacatctcaaggagggagaacccgggctgtgttgggtggttgccaatttcctagaacggaatgtgtggggtatagaaaaaggaatgaataagcgttgtttttcaaatagggtccttgtaagttattgatgagagggaaaagattgactggggagggcttaaaatgatttgggaaaacaattgcttttgaggctcagtgacaacggcaaagattacaactt

SEQ ID NO: 61 - DNA, 2253 bp, Homo sapiens
ggaagacttgggtccttgggtcgcaggtgggagccgacgggtgggtagaccgtgggggatatctcagtggcggacgaggacggcggggacaaggggcggctggtcggagtggcggagcgtcaagtcccctgtcggttcctccgtccctgagtgtccttggcgctgccttgtgcccgcccagcgcctttgcatccgctcctgggcaccgaggcgccctgtaggatactgcttgttacttattacagctagaggcatcatggaccgatctaaagaaaactgcatttcaggacctgttaaggctacagctccagttggaggtccaaaacgtgttctcgtgactcagcaaattccttgtcagaatccattacctgtaaatagtggccaggctcagcgggtcttgtgtccttcaaattcttcccagcgcgttcctttgcaagcacaaaagcttgtctccagtcacaagccggttcagaatcagaagcagaagcaattgcaggcaaccagtgtacctcatcctgtctccaggccactgaataacacccaaaagagcaagcagcccctgccatcggcacctgaaaataatcctgaggaggaactggcatcaaaacagaaaaatgaagaatcaaaaaagaggcagtgggctttggaagactttgaaattggtcgccctctgggtaaaggaaagtttggtaatgtttatttggcaagagaaaagcaaagcaagtttattctggctcttaaagtgttatttaaagctcagctggagaaagccggagtggagcatcagctcagaagagaagtagaaatacagtcccaccttcggcatcctaatattcttagactgtatggttatttccatgatgctaccagagtctacctaattctggaatatgcaccacttggaacagtttatagagaacttcagaaactttcaaagtttgatgagcagagaactgctacttatataacagaattggcaaatgccctgtcttactgtcattcgaagagagttattcatagagacattaagccagagaacttacttcttggatcagctggagagcttaaaattgcagattttgggtggtcagtacatgctccatcttccaggaggaccactctctgtggcaccctggactacctgccccctgaaatgattgaaggtcggatgcatgatgagaaggtggatctctggagccttggagttctttgctatgaatttttagttgggaagcctccttttgaggcaaacacataccaagagacctacaaaagaatatcacgggttgaattcacattccctgactttgtaacagagggagccagggacctcatttcaagactgttgaagcataatcccagccagaggccaatgctcagagaagtacttgaacacccctggatcacagcaaattcatcaaaaccatcaaattgccaaaacaaagaatcagctagcaaacagtcttaggaatcgtgcagggggagaaatccttgagccagggctgccatataacctgacaggaacatgctactgaagtttattttaccattgactgctgccctcaatctagaacgctacacaagaaatatttgttttactcagcaggtgtgccttaacctccctattcagaaagctccacatcaataaacatgacactctgaagtgaaagtagccacgagaattgtgctacttatactggttcataatctggaggcaaggttcgactgcagccgccccgtcagcctgtgctaggcatggtgtcttcacaggaggcaaatccagagcctggctgtggggaaagtgaccactctgccctgaccccgatcagttaaggagctgtgcaataaccttcctagtacctgagtgagtgtgtaacttattgggttggcgaagcctggtaaagctgttggaatgagtatgtgattctttttaagtatgaaaataaagatatatgtacagacttgtattttttctctggtggcattcctttaggaatgctgtgtgtctgtccggcaccccggtaggcctgattgggtttctagtcctccttaaccacttatctcccatatgagagtgtgaaaaataggaacacgtgctctacctccatttagggatttgcttgggatacagaagaggccatgtgtctcagagctgttaagggcttatttttttaaaacattggagtcatagcatgtgtgtaaactttaaatatgcaaataaataagtatctatgtctaaaaaaaaaaaaaaaa

SEQ ID NO: 62 - DNA, 452 bp, Homo sapiens
tttttaagagagaggcaattttattcttccaaaaaaatgcaccaagagagggtgagcacaggagcacccctggccacatcccccatcctaagcagggtctgagatgaggccaggcctgacgtgggcttgctcgcttgctcgcttgctcctcagtcctagcttcatcaaacactggttcctggaatcctgtctgctgtcttgctctcgaagtgggtctggatatgctcagtggtgtcccccccaccaatccgccagtgcagcaggccactgtcaaactcctgcacacgcccaagcttatctgagcagtccaccacaaatggatcattcttctgtacgatctttactggaagcttgtcaaacttactgatcagcttccttcaccaaatcgcactggctcctggactcttttcctatcttcaccacgaactgctgcttgctccttcctggaatcc

SEQ ID NO: 63 - DNA, 481 bp, Homo sapiens
ttttttttttttttaactgctgccaccaccatgaaagagtggccaccacatctttattgcatactcaggtgaataacttattatacaatgaacactcctccattaggagaccatgcccacttacagaatgcagccgtaaatgcggtaaatctatttacagaggttggggtgcaagatgagagaagtatcagccccaggaatttgaagtgagaatgatctacaaattctcctgacaaggagcaaccgggcttgtgctagtgaggtctgaaagaattcctggcagagcgtagggggagattagatctcggaattgacagaatcaaagaagcaacctcatcaccagtctccccattactactcctatggcagatgttatcgatctacagtctggtcctgtggcctaatactaccgggcctgaagataatactggaatgcttcctgaagcaaccacagctggcaaagtttaaacctgcctgcctc

SEQ ID NO: 64 - DNA, 1755 bp, Homo sapiens
cctcggctccggaatcactgcagcccccctcgccctgagccagagcaccccgggtcccgccagcccctcacactcccagcaaaatgggcaaggagaagacccacatcaacatcgtggtcatcggccacgtggactccggaaagtccaccaccacgggccacctcatctacaaatgcggaggtattgacaaaaggaccattgagaagttcgagaaggaggcggctgagatggggaagggatccttcaagtatgcctgggtgctggacaagctgaaggcggagcgtgagcgcggcatcaccatcgacatctccctctggaagttcgagaccaccaagtactacatcaccatcatcgatgcccccggccaccgcgacttcatcaagaacatgatcacgggtacatcccaggcggactgcgcagtgctgatcgtggcggcgggcgtgggcgagttcgaggcgggcatctccaagaatgggcagacgcgggagcatgccctgctggcctacacgctgggtgtgaagcagctcatcgtgggcgtgaacaaaatggactccacagagccggcctacagcgagaagcgctacgacgagatcgtcaaggaagtcagcgcctacatcaagaagatcggctacaacccggccaccgtgccctttgtgcccatctccggctggcacggcgacaacatgctggagccctcccccaacatgccgtggttcaagggctggaaggtggagcgtaaggagggcaacgcaagcggcgtgtccctgctggaggccctggacaccatcctgccccccacgcgccccacggacaagcccctgcgcctgccgctgcaggacgtgtacaagattggcggcattggcacggtgcccgtgggccgggtggagaccggcatcctgcggccgggcatggtggtgacctttgcgccagtgaacatcaccactgaggtgaagtcagtggagatgcaccacgaggctctgagcgaagctctgcccggcgacaacgtcggcttcaatgtgaagaacgtgtcggtgaaggacatccggcggggcaacgtgtgtggggacagcaagtctgacccgccgcaggaggctgctcagttcacctcccaggtcatcatcctgaaccacccggggcagattagcgccggctactccccggtcatcgactgccacacagcccacatcgcctgcaagtttgcggagctgaaggagaagattgaccggcgctctggcaagaagctggaggacaaccccaagtccctgaagtctggagacgcggccatcgtggagatggtgccgggaaagcccatgtgtgtggagagcttctcccagtacccgcctctcggccgcttcgccgtgcgcgacatgaggcagacggtggccgtaggcgtcatcaagaacgtggaaaagaagagcggcggcgccggcaaggtcaccaagtcggcgcagaaggcgcagaaggcgggcaagtgaagcgcgggccgcggcgcgaccctccccggcggcgccgcgctccgaaccccggcccggcccccgccccgcccccgccccgcgcgccgctccggcgccccgcacccccgccaggcgcatgtctgcacctccgcttgccagaggccctcggtcagcgactggatgctcgccatcaaggtccagtggaagttcttcaagaggaaaggcgcccccgccccaggcttccgcgcccagcgctcgccacgctcagtgcccgttttaccaataaactgagcgaccccag

SEQ ID NO: 65 - DNA, 3248 bp, Homo sapiens
ctagaacgaaaggagtgaggcgccgagagcccagataccattttggcgtgagagctggtggttggcaaggccgcgggagtgggaagcgtccgccatgttctgcgaaaaagccatggaactgatccgcgagctgcatcgcgcgcccgaagggcaactgcctgccttcaacgaggatggactcagacaagttctggaggagatgaaagctttgtatgaacaaaaccagtctgatgtgaatgaagcaaagtcaggtggacgaagtgatttgataccaactatcaaatttcgacactgttctctgttaagaaatcgacgctgcactgtagcatacctgtatgaccgcttgcttcggatcagagcactcagatgggaatatggtagcgtcttgccaaatgcattacgatttcacatggctgctgaagaaatggagtggtttaataattataaaagatctcttgctacttatatgaggtcactgggaggagatgaaggtttggacattacacaggatatgaaaccaccaaaaagcctatatattgaagtccggtgtctaaaagactatggagaatttgaagttgatgatggcacttcagtcctattaaaaaaaaatagccagcactttttacctcgatggaaatgtgagcagctgatcagacaaggagtcctggagcacatcctgtcatgaccatgcgccgaggcacttccaggcttcactcaactcatggactcctctgtactcactctctccaccctcccttcacctccctctttgattttagaagctatagacattgtttaagataactaagaatacttggctaagaagtataatttgctaactattaaggactttctttttttaatgttgtacactattcttcctactcttttttggttttggttttgttttgtagagactgtctcactatgttgcccaagctggtctcaaactcctggcctcaagcagtcctcccaccttagcttctcaaagtgttgagatcacaggcgtgagccactgcacccgacccctactcctttttctaataagctgtatctgtaatcacagcattcctacagttgttacagtgtgttttttaaatgaaagtaaacatggttacatttgaatctcttaaataatcagtcacttggctggacaggaagaaggtagatcctgtgtgtcttgttttctggtcatgtgtattgtacaagctagagagctgaatttctgagatacacattttcaaatcacatgcaagtgaagatgatggtctgtagaaattttcagtatatataatgtttaatgacatactaatttatcatctggctatttgggaaggaaggacacacatggattttgcacatttccaccatggtggctggtgtggcttgtggctatggggtgatcaccagtatcaccactttggaaggggacagtgaaattggggctagagaaggaactttgtacagttttccctgagattcagattgactgaaaagtcacatgaagagttgattgtcttttaatggtatgttttaaacagctgacattttaaattttgatgaaatccagtttattcgtttgttcttttatgctttgggtgttgcatccgagaaatcttttcccatcccaagatcacaattttttttcctttttacttctagaagtgttataattttaagctttatactttggtctatgacccgtttttttttttgttttgttttgttttttcgtttgtttctttgttttgagatggagtcttgttctgtcacccaggctggggtgcagtggcgtgatcttggctcactgcaatctctatcccctgggttcaagtgattctcttgtctcagcctcccaagtagctgggattacaggcacaggccgccacgcccggctaatttttgtatttttagtagagacagagttttaccatgttggccaggctggtttcaaactcctgacctcaagtgacccaccttggcctcccaaagttttgggattacaagtgtgggccaccgcggccagcctatgatccattttgaatgaattttttatatggtgcaaggtgtcaatccaccttcactttttcttgggaatatagatatccagctgtttcactaccattttttgaaaggactgccctttgctctatcacctttgcatttttgttaaaaagtagttgtcaatgtatatgtgggtttatttcaggactctgttttgttccattgacctgtttttctctcctgaatgccaataccatatttgtatgtagtgtatgtaattttctaataattcttgaaacagatagtattaatgcgtcatatttttgctgttgtttgtattttttgtggagatggggtttcaccatgttggccaggctgtgttgaactcctgagctaaagcaatacacttgcctcgtcctccccatgtgctgggattacaggcgtgagccttggtgctggcccagtgtaccacatttctttttgagatttgttttggctatgttaagtcctttgcttttgatgtgaaatttgggaacaggcagggtgtggtggcttatgcctgtaatcctagaactttgggaggcctagatgggtggatcacttgagctcaggagttccagaccagcccgggcctatggcgaaactccgtctctacaaaaaatagaaaaaattagccaggtgtggtggtgcatgcctgtagtcacagttacacggcaggctgaggtgggaggatcacttgaaccccagaggtcaagactgcagtgagctgagatcacaccactgtactccagcctgggtgacaaagtgagactctatctcaaaaagaaattaggatcaacttgtcaatttctacaacaacaacaacaaaaacccctgttgggcaccttgattgagattgcattgaatttatataaaactgttgggagaattgacatcttaataatattgagtcttctggcctataaacaaggtctgtcttcctaggtattaatgttttgtcttctatttctcttaataatcttttgtagttttcagtgtacaggtctaccatgtcagcatttcatagttttgatgctaaatggtattttaaaatttcaaattctaaccacttgttgctagtaaatagaaatacaattgatgttgaacttgtatccttcagccttgctaaactgtgagttctcatggtgtttttgtaaattacatcaacagtcatgtgttctatgaataaagagttttactccttc

SEQ ID NO: 66 - DNA, 530 bp, Homo sapiens
tttttcgctgccaaaattcatttttcattaacacggggtgggggcgcaggctcaggcccccgggcccgatcatggccccagtccgaacagagcgcccggccctggccgcccgcagctccaccgctcagccagtgatgcgcacatccgtgcggcggcggatccgccgggcccgagccgcctcgggcaggatggcgagcagctgctcttgcaccagcatctccacgatctgctccttggtgcggatgtcaggccgcagccactggcgggacagctcccgcagctgccggaaagcctcccggggacccgccgcatcctggtagcggaactgccggaaacgctggcggaacgtctcgggaccgagtctagagccggcggggcctggtgtggagcgcgcttcagcttcggcctgaggcgctacgctcacgggtgcgggcccgagaggcagctccagggccgcggaggccgcagctcggggcgtagggatggcttcagggaccgcggcgttgggactggaaggctcaggggcaggc

SEQ ID NO: 67 - DNA, 508 bp, Homo sapiens
  misc_feature (1)..(508): n = a, t, g, or c
tttgagctcttgacacctttattggaaggatcctcaaggctgtgggcaccgaggtctggaggcaacagaagcagcatccacccacccaccacagtggcaganacactccgtgcaaaaacccatcacagagagaaggaccatggagcccctgcaaagccatcatggagagaaggaaagtccccactgtccatcagccccggccaggcctggtccctcaacccctgtagaaccccaagcaggccgatgtgggaggcatcaccacacgtgggttccaactgcttctccaaaccctgtggtctcacatgaggcagggaggaaatttgaaaatggcagcagcttggggcacggaggctcctgcccataatcccaccactttggaaggccaaggtgggtggatcacttgagcccaggagtttgagatcagtctggacaacatagtgagaccccatctcgacatttttttaaatatttttaaaatataaataaacagcaatacaagaaaaacccc

SEQ ID NO: 68 - DNA, 278 bp, Homo sapiens
ttttttttggtgaatgagaccagtgatttttaaactttttttagccacagaccttttgttcaaaggaaaccttaaatggagatgtaacacgccagctgcttaaagacacaggctctgcaagagtgagtgtgggagtgggaggggggctaccagtctcgccagctgggccccctcgctgcttctgcccagctctccctgctgcagcactggcactgcagggaaccttcccagccacggggggctgagcctggggcctgtcaagccctgactggacatct

SEQ ID NO: 69 - DNA, 1068 bp, Homo sapiens
ggccctgctggtcccactggagctcgtggtgcccccggagaccgtggtgagcctggtccccccggccctgctggctttgctggcccccctggtgctgacggccaacctggtgctaaaggcgaacctggtgatgctggtgccaaaggcgatgctggtccccctgggcctgccggacccgctggaccccctggccccattggtaatgttggtgctcctggagccaaaggtgctcgcggcagcgctggtccccctggtgctactggtttccctggtgctgctggccgagtcggtcctcctggcccctctggaaatgctggaccccctggccctcctggtcctgctggcaaagaaggcggcaaaggtccccgtggtgagactggccctgctggacgtcctggtgaagttggtccccctggtccccctggccctgctggcgagaaaggatcccctggtgctgatggtcctgctggtgctcctggtactcccgggcctcaaggtattgctggacagcgtggtgtggtcggcctgcctggtcagagaggagagagaggcttccctggtcttcctggcccctctggtgaacctggcaaacaaggtccctctggagcaagtggtgaacgtggtccccccggtcccatgggcccccctggattggctggaccccctggtgaatctggacgtgagggggctcctgctgccgaaggttcccctggacgagacggttctcctggcgccaagggtgaccgtggtgagaccggccccgctggaccccctggtgctctggtgctctggtgcccctggccccgttggccctgctggcaagagtggtgatcgtggtgagactggtcctgctggtcccgccggtcctgtcggccctgttggcgcccgtggccccgccggaccccaaggcccccgtggtgacaagggtgagacaggcgaacagggcgacagaggcataaagggtcaccgtggcttctctggcctccagggtccccctggccctcctggggaccccattcccgaggagctttatgagatgctgagtgaccactcgatccgctcctttga

SEQ ID NO: 70 - DNA, 1674 bp, Homo sapiens
tgtgaggcgcaggcagggctctggggcacctagagaccggggccggagacgtggcagccgccctgcccgccagaaagtttcctagaagtttgctgggcgcgggcgcacgactgactggctggaccatgaacgtgttccgaatcctcggcgacctgagccacctcctggccatgatcttgctgctggggaagatctggaggtccaagtgctgcaagggcatctctgggaagagccagatcctgtttgctctcgtcttcaccaccaggtacctggacctgttcaccaacttcatctccatctacaacacagtaatgaaggtggtttttctcctctgtgcctatgttacagtgtacatgatatatgggaaattccgtaaaacttttgacagtgagaatgacacattccgcctggagtttcttctggtcccagtcattggcctttccttccttgaaaactacagtttcactctgctggagatcctctggactttctctatctatctggaatcagtggctatcctgccccagctcttcatgatcagcaagactggagaggctgagaccataactactcactacctgttctttctgggtctgtaccgggcactctacctggctaactggatcaggcggtaccagactgagaatttctatgaccaaattgcagtcgtgtctggagtagtacaaaccatcttctactgtgacttcttctacttgtatgtgaccaaagtccttaagggaaagaagttaagtcttccaatgccaatctgaggaccttcagagacagtctacgccttaacaagcacatgaaggaaactattttgaatgttctctttggcaacttatccataatttgggatcaaatgttaaaaccagaaaagtgtttagtgtggatttcagcaaaacctgatcatcccacccagaagaccttctcatcaatagatcgcccttaaagacccattgtaaggtcataaaaaacctcggccacctgcacaaagatggtgcctcactgcaacaagaaaccttaaggtgtcttaccgacgaaataaaaaacataaatgattgttctccaaggcctgagggcaagactcatgatgagcaagtcaaccccaatctggaacaatgtccctcctcttagaatgtcccaactaaagaccagttaaaatattagggtacgttcttgtgaatttccactttccaggtagatgaccaaatttaggtggtcaagatataaaggtgtcagctagttttaagtgtgaaacttatttcactttcacactgccttcaggccagaagcaaaccaaatttaccaggtttggctggaggagttttgtgactcatcttttactggtttgaattttttcaaaccagtggctgatacctgccttgtacttagtaccttaataccaataacctaatggtacttaggcgagtaccatttgcacaatcactgttttacttatgagcagatacagatatatccaaacccttacctactaggtatcctgctagggttttcaattccaattcttgtattaagttttttcctttcagttttaggtgcgaaagtaatcagtcaatccaatatcccccatctttgtcttgaaacaaaaactgttttaagacgtctacgttgaattattcagagaattaagcaataaaagctcacacctta

SEQ ID NO: 71 - DNA, 513 bp, Homo sapiens
gcacgagtttgagatggagtcttactctgtcacccaggctggagtgcagtagcacgatcttggcttactgcaacctctacctcctaggttcaagcaattgtcctgtctcagcctcccgagtactgggactactgtcttgcgccaccatgcctggctaatttttgtatatttagtaaagatgggttttcgccatgttggccaggctggtctcaaactcctggcctcaagtgatgcacctgcctcagccttccaaagtgctgggattacaggcatgagccaccgtgcccggccaaagtcagctttcaaaatccaagccataattggtgaggggggagtttcagaattacatagaaaaattaatatttgaaaaaataattctgaaatttcgaatttaaaaacagatgtgctgcttctgggtgtaggtagtaaaagtataggaaaagaactgtttccttagaagcggactgtggaagggctatgtagaatgtcaaagggcaacaagagcctgtgttt

SEQ ID NO: 72 - DNA, 2235 bp, Homo sapiens
atggctgtgctgcctggccctctgcagctgctgggagtgctgcttaccatttccctgagttccatcaggctcattcaggctggtgcctactatgggatcaagccgctgccacctcaaattcctcctcagatgccaccacaaattccacaataccagcccctgggtcagcaagtacctcacatgcctttggccaaagatggcctcgccatgggcaaggagatgccccacttgcagtatggcaaagagtatccacacctaccccaatatatgaaggaaattcaaccggcgccaagaatgggcaaggaagccgttcccaagaaaggcaaagaaataccattagccagtttacgaggggaacaaggtccccgtggagagcctggcccaagaggaccacctgggccccctggtttaccaggtcatgggatacctggaattaaaggaaaaccagggccacagggatatccaggagttggaaagccaggtatgcctggaatgccagggaagccaggagccatgggcatgcctggggcaaaaggagaaattggacagaaaggggaaattgggcctatggggatcccaggaccacaaggacctccagggcctcatggacttcctggcattgggaagccaggtgggccagggttaccagggcaaccaggaccaaagggtgatcgaggacccaaaggactaccaggacctcaaggccttcggggtcctaaaggagacaagggcttcgggatgccaggtgcgccaggtgtaaaggggcctccagggatgcacggcctccccggccctgttggactgccaggagtgggcaaaccaggagtgacaggcttccctgggccccagggccccctgggaaagccaggggctccaggagaacccggtcgacaaggccctattggggtaccgggggttcaaggacctcctgggatacccggaattggaaagccaggccaggatgggatcccaggccagccaggatttccaggtggcaaaggggagcaaggactgccagggctaccaggggccccaggccttccagggattgggaaaccaggcttcccaggacccaaaggtgaccggggcatgggaggtgttcctggggctcttggaccaagaggggagaaaggaccaataggttccccaggaatagggggttctccaggagagccaggcctgcctggaatcccaggtcctatgggccctccaggtgctattggttttcctggacccaaaggagaaggtgggattgtagggccacaggggccaccaggtcccaagggtgagccagggcttcaaggcttcccaggaaagccaggtttccttggtgaagtagggcctcctggcatgaggggtttcccaggtcccataggccccaagggggaacatgggcaaaaaggtgtaccaggactccctggtgttccagggcttctcggacctaagggagaaccaggaatcccaggggatcagggtttacagggccccccaggtatcccagggattgggggccctagtggccccattggaccacctgggattccaggccccaaaggggagcctggcctcccagggccccctgggttccctggtatagggaaacccggagtggcaggacttcatggccccccagggaagcctggtgcccttggtcctcaaggccagcctggccttccaggacccccaggccctccaggacctccaggacccccagctgtgatgccccctacaccaccaccccagggagagtatctgccagatatggggctgggaattgatggcgtgaaacccccccatgctacgggggctaagaaaggcaagaatggagggccagcctatgagatgcctgcatttaccgccgagctaaccgcaccctttccaccggtggggggcccagtgaagtttaacaaactgctgtataacggcagacagaactacaacccgcagacaggcatcttcacctgtgaggtccctggtgtctactactttgcataccacgttcactgcaagggggggaacgtgtgggttgctctattcaagaacaacgagcccgtgatgtacacgtacgacgagtacaaaaagggcttcctggaccaggcatctgggagtgcagtgctgctgctcaggcccggagaccgggtgttcctccagatgccctcagaacaggctgcaggactgtatgccgggcagtatgtccactcctccttttcaggatatttattgtatcccatgtaa

SEQ ID NO: 73 - DNA, 564 bp, Homo sapiens
tttttttttttacacttgggttttaggtatttatttacaaagttcttactaatacaattgcttttaaaatgtagcaaagagtcatttactactctcagaagtggcacatacatggcatagaaaacaatctatagtcagttaactattaaaacagaaacttgaaatttaagtgacaaacatttgtagcactccctaaagaaataggaaataaaaatgcatttatccatatgaacttgattattctgaattactgactataaaaaggctattgtgaaagatatcacactttgaaacagcaaatgaattttcaattttacatttaattataagaccacaataaaaagttgaacatgcgcatatctatgcatttcacagaagattagtaaaactgatggcaacttcagaattatttcatgaagggtacaaacagtctttaccacaattttcccatggtcttatccttcaaaataaaattccacacactatcaaactaaatcaagatttgctagtggataaaattaccataaatataccgtactctctctgaaacagctacaaacatct

SEQ ID NO: 74 - DNA, 3866 bp, Homo sapiens
ggaattcctttttttttttttttgagatggagtttcactcttgttggccaggctggagtgcaatggcacaatctcagcttactgcaacctccgcctcccgggttcaagcgattctcctgcctcagcctctcaagtagctgggattacaggcatgtgccaccacccctggctaactaatttcttttctatttagtagagatggggtttcaccatgttggtcaggctggtcttgaactcctgacctcaggtgatccacttgccttggcctcccaaagtgctaggattacagccgtgaaactgtgcctggctgattctttttttgttgttggatttttgaaacagggtctcccttggtcgcccaggctggagtgcagtggtgcgatcttggctcactataacctccacctcctggtttcaagtgatcctcccactttagcctcctgagtagctgtgattacaggcgtgcaccaccacacccggctaatttttgtatttttattagagacagggtttcaccatgttggccaggctgttctcaaactcctggactcaagggatccgcctgcctccacttcccaaagtcccgagattacaggtgtgagtcaccatgcctgaccttataattcttaagtcattttttctggtccatttcttccttagggtcctcacaacaaatctgcattaggcggtacaataatccttaacttcatgattcacaaaaggaagatgaagtgattcatgatttagaaaggggaagtagtaagcccactgcacactcctggatgatgatcctaaatccagatacagtaaaaatggggtatgggaaggtagaatacaaaatttggtttaaattaattatctaaatatctaaaaacatttttggatacattgttgatgtgaatgtaagactgtacagacttcctagaaaacagtttgggttccatcttttcatttccccagtgcagttttctgtagaaatggaatccgaggatttaagtggcagagaattgacaattgattccataatgaacaaagtgagagacattaaaaataagtttaaaaatgaagaccttactgatgaactaagcttgaataaaatttctgctgatactacagataactcgggaactgttaaccaaattatgatgatggcaaacaacccagaggactggttgagtttgttgctcaaactagagaaaaacagtgttccgctaagtgatgctcttttaaataaattgattggtcgttacagtcaagcaattgaagcgcttcccccagataaatatggccaaaatgagagttttgctagaattcaagtgagatttgctgaattaaaagctattcaagagccagatgatgcacgtgactactttcaaatggccagagcaaactgcaagaaatttgcttttgttcatatatcttttgcacaatttgaactgtcacaaggtaatgtcaaaaaaagtaaacaacttcttcaaaaagctgtagaacgtggagcagtaccactagaaatgctggaaattgccctgcggaatttaaacctccaaaaaaagcagctgctttcagaggaggaaaagaagaatttatcagcatctacggtattaactgcccaagaatcattttccggttcacttgggcatttacagaataggaacaacagttgtgattccagaggacagactactaaagccaggtttttatatggagagaacatgccaccacaagatgcagaaataggttaccggaattcattgagacaaactaacaaaactaaacagtcatgcccatttggaagagtcccagttaaccttctaaatagcccagattgtgatgtgaagacagatgattcagttgtaccttgttttatgaaaagacaaacctctagatcagaatgccgagatttggttgtgcctggatctaaaccaagtggaaatgattcctgtgaattaagaaatttaaagtctgttcaaaatagtcatttcaaggaacctctggtgtcagatgaaaagagttctgaacttattattactgattcaataaccctgaagaataaaacggaatcaagtcttctagctaaattagaagaaactaaagagtatcaagaaccagaggttccagagagtaaccagaaacagtggcaagctaagagaaagtcagagtgtattaaccagaatcctgctgcatcttcaaatcactggcagattccggagttagcccgaaaagttaatacagagcagaaacataccacttttgagcaacctgtcttttcagtttcaaaacagtcaccaccaatatcaacatctaaatggtttgacccaaaatctatttgtaagacaccaagcagcaataccttggatgattacatgagctgttttagaactccagttgtaaagaatgactttccacctgcttgtcagttgtcaacaccttatggccaacctgcctgtttccagcagcaacagcatcaaatacttgccactccacttcaaaatttacaggttttagcatcttcttcagcaaatgaatgcatttcggttaaaggaagaatttattccatattaaagcagataggaagtggaggttcaagcaaggtatttcaggtgttaaatgaaaagaaacagatatatgctataaaatatgtgaacttagaagaagcagataaccaaactcttgatagttaccggaacgaaatagcttatttgaataaactacaacaacacagtgataagatcatccgactttatgattatgaaatcacggaccagtacatctacatggtaatggagtgtggaaatattgatcttaatagttggcttaaaaagaaaaaatccattgatccatgggaacgcaagagttactggaaaaatatgttagaggcagttcacacaatccatcaacatggcattgttcacagtgatcttaaaccagctaactttctgatagttgatggaatgctaaagctaattgattttgggattgcaaaccaaatgcaaccagatacaacaagtgttgttaaagattctcaggttggcacagttaattatatgccaccagaagcaatcaaagatatgtcttcctccagagagaatgggaaatctaagtcaaagataagccccaaaagtgatgtttggtccttaggatgtattttgtactatatgacttacgggaaaacaccatttcagcagataattaatcagatttctaaattacatgccataattgatcctaatcatgaaattgaatttcccgatattccagagaaagatcttcaagatgtgttaaagtgttgtttaaaaagggacccaaaacagaggatatccattcctgagctcctggctcatccatatgttcaaattcaaactcatccagttaaccaaatggccaagggaaccactgaagaaatgaaatatgttctgggccaacttgttggtctgaattctcctaactccattttgaaagctgctaaaactttatatgaacactatagtggtggtgaaagtcataattcttcatcctccaagacttttgaaaaaaaaaggggaaaaaaatgatttgcagttattcgtaatgtcagataggaggtataaaatatattggactgttatactcttgaatccctgtggaaatctacatttgaagacaacatcactctgaagtgttatcagcaaaaaaaattcagtgagattatctttaaaagaaaactgtaaaaatagcaaccacttatggcactgtatatattgtagacttgttttctctgttttatgctcttgtgtaatctacttgacatcattttactcttggaatagtgggtggatagcaagtatattctaaaaaactttgtaaataaagttttgtggctaaaatga

SEQ ID NO: 75 - DNA, 425 bp, Homo sapiens
  misc_feature (1)..(425): n = a, t, g, or c
gcggccgccagcccagggcctgcccatccagaagggactccccagggcctgggggaggagacccttggaaaagtcctctcttcccagctcctgattctggatctgagattctcagatcacaggcccctgtgctccaggccgaggctgggctaccctcagggagatccagagactcatgcccatggccatccatgcgtggacgctgtgtggagagtccaggatgacgggatcccgcacaagctcccttcagtccttcagggctgggcccatgtggttgatttttctaaagctggagaaaggaagaaattgtgccttgcatattacttgagcttaaactgacaacctgggatgtaaataggagccttttaactggtttattaataaagtnctattggtgattttttaaaaaaaaaaacnctcgtgcc

SEQ ID NO: 76 - DNA, 618 bp, Homo sapiens
  misc_feature (1)..(618): n = a, t, g, or c
tgtatttttggtagagatggggtttcactgtgttggccaggatggtctctatctcctgacctcatgatccactcgcctcagcctcccaaaatgctgggattataggcgtgcgncnacagcccggcccaacaacttaatcttttattagctttgcttaagagggccaattaaagcaaancctttagttccctttaacagggactggagttatgatgcatgtgttacgacttttggcccactgtccatgcaactctaagtgcaggttgatttgctttccagaaatcccaaagggcctgctcttggatcaccgaagagccttacctatatcaaatcaaaaagacattctgggtcagattagactatgctcctggccctacagattgcacataaactatcataaatacagctttttcagggaactagttctaaaactcttacctactgagaataagtcttaacactaagatgactgtattatatcaatttattattagaatcagacttatacctagcacaattaactattgtgtgggcaaagaacatttaaagggcatagtagaggtaaggagagacacatactcagctagagataaaatactaagttgcactgatacttna

SEQ ID NO: 77 - DNA, 221 bp, Homo sapiens
gttgataccttttattaaaaactttatttttctttgtcaacattactgttaaactccattccttcccctatgtgagctcttgtaatatcagattggtaggatctgaattcataactgttttggataaatctatcacatttaataaagaacctaggaaagaacaacttgagaggtggccatagaggggacaggagccctgtaccacattgatcattcgcagg

SEQ ID NO: 78 - DNA, 480 bp, Homo sapiens
gccaaaatcagaacttgcaagatagggcagttacaggtgacttctggacggtcctgtttctagccacagagaaggtggaagcctgggtggattacaaaagaccatcgacgaaataggatcctgctagaagaatttttctagtagtataatttaaaacaactggattaatccaaaagaccaaaactaataataaaaatacaaggagataagcaacaaaaacagaggagacaaaataaaaaaaaaaaacagcaagataccagacataaattcaaccatttcaataaatgcattaaatgcaaatagtcatttcaattaaagacaaacattgtcagactggattttatttttaaagatggtgcctcgccatgtcgtccaggctggagtgcagtgccacaatcatagctcactgcaggctcaagcagtcctcccatctcagccttccaagcagctaggaatacaaccaagaaataccatgaccag

SEQ ID NO: 79 - DNA, 762 bp, Homo sapiens
  misc_feature (1)..(762): n = a, t, g, or c
gagattacataggtggttataatacaaaagtgagaaaaaagctagtgtctgagtattgcatcctggatataattcctgatatatggtaaagcataaaagagacctatttcttcaggagagtagctgacccacctcagggccatgactgctcttctctttccccacagccttagtactttttgccaaaaggcccagatttgagtaaaggggaacgccgtgagcgtaggatccgggcataagggctgcagtctgttgagctttggcaggttggtgttcggggaagtaaatttcgaaggaatggtttcttccctggtggttgttggtttggttgctgattttcctggttggtaccaaggcgctttttggcagaaacctggccttggagtttcaacacagtatgatactgctcagcaatacatgctgccttcttccgaaggtccagtttcactagcaccatgttgttctgcagttcagggcaaaagagtccttgggtgcttgtagaacaagggtctccacattctcaatacggacacaaccctgatcttcctgtcgntccaactctgaaggtaacaagggcctaaccctcaagtatactttcaccttcgtcatactgtcctcagatggaacctgctgctngtcctctagggagtagagacgacagagcagtctgatagcaggttcttgcgtacgacaggaccccaaatctgcagctgtggactcaaacatggtaggaactacgacatcgtcatcggacagccagcc

SEQ ID NO: 80 - DNA, 666 bp, Homo sapiens
cacttatactaagcaccaaatcagacagatggaaatgaagattctaagagctttaaactgtggtctgggtcggcctctaccttgcacttccttcggagagcatctaagattggagaggttgatgtcgagcaacatactttagccaaatacctgatggaactaactatgttggactatgacatggtgcactttcctccttctcaaattgcagcaggagctttttgcttagcactgaaaattctggataatggtgaatggacaccaactctacaacattacctgtcatatactgaagaatctcttcttccagttatgcagcacctggctaagaatgtagtcatggtaaatcaaggacttacaaagcacatgactgtcaagaacaagtatgccacatcgaagcatgctaagatcagcactctaccacagctgaattctgcactagttcaagatttagccaaggctgtggcaaaggtgtaacttgtaaacttgagttggagtactatatttacaaataaaattggcaccatgtgccatctgtacatattactgttgcatttacttttaataaaggacaccaactctacaacattacctgtcatatactgaagaatctcttcttccagttatgcagcactggctaagaatgtgtcatggtaatcaggcttc

SEQ ID NO: 81 - DNA, 2066 bp, Homo sapiens
tcgcgctggagggcagccgcttagcgtgcgctcttgtccccgcaggtcgcagccaggcggcgggcgcgcccagccccggcccctggagcgcccgccgcggtccccacctccatggacgccttcaaggggggcatgagcctggagcggctgccggaggggttccggccgccgccgccgccaccccatgacatggggcccgccttccacctggcccggcccgccgacccccgcgagccgctcgagaactccgccagcgagtcgtctgacacggagctgccagagaaggagcgcggcggggaacccaaggggcccgaggacagtggtgcgggaggcacgggctgcggcggcgcagacgacccagccaagaagaagaagcagcggcggcaacgtacgcacttcacaagccagcagttgcaagagctagaggccacgttccagaggaaccgctaccccgacatgagcatgagggaggagatcgccgtgtggaccaacctcaccgagccgcgcgtgcgggtctggttcaagaacaggcgagccaagtggcgtaagcgcgagcgtaaccagcagctggacctgtgcaagggtggctacgtgccgcagttcagcggcctagtgcagccctacgaggacgtgtacgccgccggctactcctacaacaactgggccgccaagagcctggcgccagcgccgctctccaccaagagcttcaccttcttcaactccatgagcccgctgtcgtcgcagtccatgttctcagcacccagctccatctcctccatgaccatgccgtccagcatgggcccaggcgccgtgcctggcatgcccaactcgggcctcaacaacatcaacaacctcaccggctcctcgctcaactcggccatgtcgccgggcgcttgcccgtacggcactcccgcctcgccctacagcgtctaccgggacacgtgcaactcgagcctagccagcctgcggctcaagtccaaacagcactcgtcgtttggctacggcggcctgcagggcccggcctcgggcctcaacgcgtgccagtacaacagctgaccgccccgccgcaccacgcgggccggcggccggagcggggaagggcgcgggcgcggaggacgcacgcggggccccggctcgcaagccccagctcaccgcgccgcggacctcacacctgcgcagccccctcctcccacttcccactccgggttggttttgtgtttgcttttccggaccccactctgccctccaaaaagacaaaaaaaaaaaaaaaaaaaaaagcaaaaagacgtcggagaaaagtgccgcgaaaaaatggatgagttgcaatttctctcgggatggcgcgggtggtgtgtgtgtgttcccacgggccccggaggcccactccgcggagggcacgcggcgcggtaggcaagcgccgaggcccagcggccgggggaggacaacctcgtatcccgcgcccccgccgcgctggatccggactgagcggccgggcctgcggactggatgtgcggggcctggacttgcctaggatttcccgaccccgtacaaaccaagttgccctctccgagctaggcccggccgagagcgccttaactcgagtcggatccgtgttggggcgggcgttgggtttggggggacggtgcccccagcccaggatcgggcactcagtggagccgcacacggcccggcgcgcctggtagagcctcgctggccccgcgccccggagccctatattaaggccacggagcgacagcgggcagtgcgggcctggcgggaggtgggggaggtccatctcagaacaccccagccttgagcttagctgcaggcccaggccctctgctctgctcccgggctaggaggtggccctctgtctgggcgaacagccccctcctcaccgcccgccgtgcaagagtcgagccggcagagcaaggggcgcggccccagggccctgcgcccactttgcacacccgctctccggcccgcgcccctgtttacagcgtccctgtgtatgttggactgactgtaataaatctgtctatatcgactaaaaaaaaaaaaaaaaa

SEQ ID NO: 82 - DNA, 460 bp, Homo sapiens
tttttttttttatttttattttttgaaggaggattatttactggtggtctaaaagaagtaccttcaacttcttcataattgtagccaaagcggaaatggaatatttaataattcttacatctcactaatgtagtcttctgagataacaattaagcagagagattattttctatgttcaaactttaaacactttgtaaagataattgggatttcataacaaatgataataagtggttttgtgcattaattttcttgatacccaataacatgccaattaaaatccagacttcacattggcacctaatgaacacagcagaatgaccaaagttgagtgctagtcattgtcatagatgcagccatcagcaatatcatcatagatctctccatcattgtccgctaggtaactccgaaggacataaccatatttcccttcttcatttctgcagagaacttttgtgtc

SEQ ID NO: 83 - DNA, 1779 bp, Homo sapiens
gtgagaggactcaaacgttggaccaagagaaccagcagcttcaggaccagctcagagatgcccagcagcaggtcaaggccctggggacagagcgcacaacactggaggggcatttagccaaggtacaggcccaggctgagcagggccaacaggagctgaagaacttgcgtgcttgtgtcctggagctggaagagcggctgagcacgccaggagggcttggtgcaagagcttcagaaaaaacaggtggaattgcaggaagaacggaggggactgatgtcccaactagaggagaaggagaggaggctgcaacatcagaagcagccctgtcaagcagccaagcagaagtggcatctctgcggcaggagactgtggcccaggcagccttactgactgagcgggaagaacgtcttcatgggctagaaatggagcgccggcgactgcacaaccagctgcaggaactcaagggcaacatccgtgtattctgccgggtccgccctgtcctgccgggggagcccactccaccccctggcctcctcctgtttccctctggccctggtgggccctctgatcctccaacccgccttagcctctcccggtctgacgagcggcgtgggaccctgagtggggcaccagctcccccaactcgccatgatttttcctttgaccgggtattcccaccaggaagtggacaggatgaagtgtttgaagagattgccatgcttgtccagtcagccctggatggctatccagtatgcatctttgcctatggccagacaggcagtggcaagaccttcacaatggagggtgggcctgggggagacccccagttggaggggctgatccctcgggccctgcggcacctcttctctgtggctcaggagctgagtggtcagggctggacctacagctttgtagcaagctacgtagagatctacaatgagactgtccgggacctgctggccactggaacccggaagggtcaagggggcgagtgtgagattcgccgtgcagggccagggagtgaggagctcactgtcaccaatgctcgatatgtccctgtctcctgtgagaaagaagtggacgccctgcttcatctggcccgccagaatcgggctgtggcccgcacagcccagaatgaacggtcatcacgcagccacagtgtattccagctacagatttctggggagcactccagccgaggcctgcagtgtggggcccccctcagtcttgtggacctggccgggagtgagcgacttgaccccggcttagccctcggccccggggagcgggaacgccttcgggaaacacaggccattaacagcagcctgtccacgctggggctggttatcatggccctgagcaacaaggagtcccacgtgccttaccggaacagcaaactgacctacctgctgcagaactctctgggtggtagtgctaagatgctcatgtttgtgaacatttctccactggaagagaacgtctccgagtccctcaactctctacgctttgcctccaaggtgaaccagtgtgttattggtactgctcaggccaacaggaagtgaagacggatccagatctgtgtgtgtgtgtgtgtgtgtgtgtgtgtgtgtgtgtcctatgtctatgtatcgggtgaggggtgggagggttgctggagggtgctttattgggtggagggcaccatgtcccagggctatcaaataaagaatagtttggttttttttttaaataaaggttttattaccatttgcccaagaaggcagatactttcatatctgt

SEQ ID NO: 84 - DNA, 2828 bp, Homo sapiens
atatggagaagagccaagaggagatggatcaagcattagcagaaagcagcgaagaacaggaagatgcactgaatatctcctcaatgtctttacttgcaccattggcacaaacagttggtgtggtaagtccagagagtttagtgtccacacctagactggaattgaaagacaccagcagaagtgatgaaagtccaaaaccaggaaaattccaaagaactcgtgtccctcgagctgaatctggtgatagccttggttctgaagatcgtgatcttctttacagcattgatgcatatagatctcaaagattcaaagaaacagaacgtccatcaataaagcaggtgattgttcggaaggaagatgttacttcaaaactggatgaaaaaaataatgcctttccttgtcaagttaatatcaaacagaaaatgcaggaactcaataacgaaataaatatgcaacagacagtgatctatcaagctagccaggctcttaactgctgtgttgatgaagaacatggaaaagggtccctagaagaagctgaagcagaaagacttcttctaattgcaactgggaagagaacacttttgattgatgaattgaataaattgaagaacgaaggacctcagaggaagaataaggctagtccccaaagtgaatttatgccatccaaaggatcagttactttgtcagaaatccgcttgcctctaaaagcagattttgtctgcagtacggttcagaaaccagatgcagcaaattactattacttaattatactaaaagcaggagctgaaaatatggtagccacaccattagcaagtacttcaaactctcttaacggtgatgctctgacattcactactacatttactctgcaagatgtatccaatgactttgaaataaatattgaagtttacagcttggtgcaaaagaaagatccctcaggccttgataagaagaaaaaaacatccaagtccaaggctattactccaaagcgactcctcacatctataaccacaaaaagcaacattcattcttcagtcatggccagtccaggaggtcttagtgctgtgcgaaccagcaacttcgcccttgttggatcttacacattatcattgtcttcagtaggaaatactaagtttgttctggacaaggtcccctttttatcttctttggaaggtcatatttatttaaaaataaaatgtcaagtgaattccagtgttgaagaaagaggttttctaaccatatttgaagatgttagtggttttggtgcctggcatcgaagatggtgtgttctttctggaaactgtatatcttattggacttatccagatgatgagaaacgcaagaatcccataggaaggataaatctggctaattgtaccagtcgtcagatagaaccagccaacagagaattttgtgcgagacgcaacacttttgaattaattactgtccgaccacaaagagaagatgaccgagagactcttgtcagccaatgcagggacacactctgtgttaccaagaactggctgtctgcagatactaaagaagagcgggatctctggatgcaaaaactcaatcaagttcttgttgatattcgcctctggcaacctgatgcttgctacaaacctattggaaagccttaaaccgggaaatttccatgctatctagaggtttttgatgtcatcttaagaaacacacttaagagcatcagatttactgattgcattttatgctttaagtacgaaagggtttgtgccaatattcactacgtattatgcagtatttatatcttttgtatgtaaaactttaactgatttctgtcattcatcaatgagtagaagtaaatacattatagttgattttgctaaatcttaatttaaaagcctcattttcctagaaatctaattattcagttattcatgacaatatttttttaaaagtaagaaattctgagttgtcttcttggagctgtaggtcttgaagcagcaacgtctttcaggggttggagacagaaacccattctccaatctcagtagttttttcgaaaggctgtgatcatttattgatcgtgatatgacttgttactagggtactgaaaaaatgtctaaggcctttacagaaacatttttagcaatgaggatgagaactttttcaaatagcaaatatatattggcttaaagcatgaggctgtcttcagaaaagtgatgtggacataggaggcaatgtgtgagacttgggggttcaatattttatatagaagagttaataagcacatggtttacatttactcagctactatatatgcagtgtggtgcacattttcacagaattctggcttcattaagatcattatttttgctgcgtagcttacagacttagcatattagttttttctactcctacaagtgtgaattgaaaaatctttatattaaaaaagtaaactgttatgaagctgctatgtactaataatactttgcttgccaaagtgtttgggttttgttgttgtttgtttgtttgtttgtttttggttcatgaacaacagtgtctagaaacccattttgaaagtggaaaattattaagtcacctatcacctttaaacgcctttttttaaaattataaaatattgtaaagcagggtctcaacttttaaatacactttgaacttcttctctgaattattaaagttctttatgacctcatttataaacactaaattctgtcacctcctgtcattttattttttattcattcaaatgtattttttcttgtgcatattataaaaatatattttatgagctcttactcaaataaatacctgtaaatgtctaaagg

SEQ ID NO: 85 - DNA, 1633 bp, Homo sapiens
tgctccctgacagccacaaacctacagcactgactgcattcagagaggaacctgcaaacaaaacttcacagaaaactttttgttcttgttccagagaatttgctgaagaggagaaggaaaaaaaaaacaccaaaaaaaaaaataaaaaaatccacacacacaaaaaacctgcgcgtgaggggggaggaaaagcagggccttttaaaaaggcaatcacaacaacttttgctgccaggatgcccttgctttggctgagaggatttctgttggcaagttgctggattatagtgaggagttcccccaccccaggatccgaggggcacagcgcggcccccgactgtccgtcctgtgcgctggccgccctcccaaaggatgtacccaactctcagccagagatggtggaggccgtcaagaagcacattttaaacatgctgcacttgaagaagagacccgatgtcacccagccggtacccaaggcggcgcttctgaacgcgatcagaaagcttcatgtgggcaaagtcggggagaacgggtatgtggagatagaggatgacattggaaggagggcagaaatgaatgaacttatggagcagacctcggagatcatcacgtttgccgagtcaggaacagccaggaagacgctgcacttcgagatttccaaggaaggcagtgacctgtcagtggtggagcgtgcagaagtctggctcttcctaaaagtccccaaggccaacaggaccaggaccaaagtcaccatccgcctcttccagcagcagaagcacccgcagggcagcttggacacaggggaagaggccgaggaagtgggcttaaagggggagaggagtgaactgttgctctctgaaaaagtagtagacgctcggaagagcacctggcatgtcttccctgtctccagcagcatccagcggttgctggaccagggcaagagctccctggacgttcggattgcctgtgagcagtgccaggagagtggcgccagcttggttctcctgggcaagaagaagaagaaagaagaggagggggaagggaaaaagaagggcggaggtgaaggtggggcaggagcagatgaggaaaaggagcagtcgcacagacctttcctcatgctgcaggcccggcagtctgaagaccaccctcatcgccggcgtcggcggggcttggagtgtgatggcaaggtcaacatctgctgtaagaaacagttctttgtcagtttcaaggacatcggctggaatgactggatcattgctccctctggctatcatgccaactactgcgagggtgagtgcccgagccatatagcaggcacgtccgggtcctcactgtccttccactcaacagtcatcaaccactaccgcatgcggggccatagcccctttgccaacctcaaatcgtgctgtgtgcccaccaagctgagacccatgtccatgttgtactatgatgatggtcaaaacatcatcaaaaaggacattcagaacatgatcgtggaggagtgtgggtgctcatagagttgcccagcccagggggaaagggagcaagagttgtccagagaagacagtggcaaaatgaagaaatttttaaggtttctgagttaaccagaaaaatagaaattaaaaacaaaaca

SEQ ID NO: 86 - DNA, 560 bp, Homo sapiens
acaggtctttttatttaacataaggccaaagaagctatcaggcgttgctgaatactgtccactaactgtacaaaatattgactgcatgcctcgcaaacaccaaaatatccgctggaatgccatagaaataaataacttctgctataaacacatgaaaacatatcaaactgttatctctttaaacatattgtaaataaaaaaattaccagtacttctacacaataaatattaagaaaccattgacatagttgaaatgcactcatataaattaacaactttaattacattagccaaacagacattggttaaagaactgcatgtagtatgcaaaacaaaacaaaacaaaacaaaaaacaaagtaaaaaaccaacaaaatagaaacaaacaaacaaacaacatcaaccacagaacataaaaagttttaaaataaaacaggcttcagattatcttggctttcataattatatttttcttttaaagaaaaatatcaacccattgtcaatgcactgtttttcaaagcatttaaatagagggtaaaaccctttggaaattaatacaga

SEQ ID NO: 87 - DNA, 483 bp, Homo sapiens
ctgttcaaaaaaggttttatccaaaaaagttaatcaagacaagcaacagatactgcaaagcattatatacagcaccatagtccaggggccaaagaaatcaggaggggctgggcagtagaggaattccatatattaatgaatgtgagattaagtatagagtgaagacattaacacacaattctaatttctgttaggcagaatgctcccctaccctgatgccacagcctttcacgtttcctaaaccctagtaacctctgatctccatctgcctcatcaacacgtcaccaccctttgctcttcttccaattagtcacatgttggctgaatttatttcactccagtactttaggaccttgacagacaaatcgattacaaggtcaattcccaggatttcttcagggtgtgttcaggagtgcagatgttctttggatgacctttctactaaattagacctctgaaggagaaagctacttgccagaggct

SEQ ID NO: 88 - DNA, 2600 bp, Homo sapiens
aggcagtggagccccggcggcggcggcggcggcgcgcgggggcgacgcgcgggaacaacgcgagtcggcgcgcgggacgaagaataatcatgggccagactgggaagaaatctgagaagggaccagtttgttggcggaagcgtgtaaaatcagagtacatgcgactgagacagctcaagaggttcagacgagctgatgaagtaaagagtatgtttagttccaatcgtcagaaaattttggaaagaacggaaatcttaaaccaagaatggaaacagcgaaggatacagcctgtgcacatcctgacttctgtgagctcattgcgcgggactagggagtgttcggtgaccagtgacttggattttccaacacaagtcatcccattaaagactctgaatgcagttgcttcagtacccataatgtattcttggtctcccctacagcagaattttatggtggaagatgaaactgttttacataacattccttatatgggagatgaagttttagatcaggatggtactttcattgaagaactaataaaaaattatgatgggaaagtacacggggatagagaatgtgggtttataaatgatgaaatttttgtggagttggtgaatgcccttggtcaatataatgatgatgacgatgatgatgatggagacgatcctgaagaaagagaagaaaagcagaaagatctggaggatcaccgagatgataaagaaagccgcccacctcggaaatttccttctgataaaatttttgaagccatttcctcaatgtttccagataagggcacagcagaagaactaaaggaaaaatataaagaactcaccgaacagcagctcccaggcgcacttcctcctgaatgtacccccaacatagatggaccaaatgctaaatctgttcagagagagcaaagcttacactcctttcatacgcttttctgtaggcgatgttttaaatatgactgcttcctacatccttttcatgcaacacccaacacttataagcggaagaacacagaaacagctctagacaacaaaccttgtggaccacagtgttaccagcatttggagggagcaaaggagtttgctgctgctctcaccgctgagcggataaagaccccaccaaaacgtccaggaggccgcagaagaggacggcttcccaataacagtagcaggcccagcacccccaccattaatgtgctggaatcaaaggatacagacagtgatagggaagcagggactgaaacggggggagagaacaatgataaagaagaagaagagaagaaagatgaaacttcgagctcctctgaagcaaattctcggtgtcaaacaccaataaagatgaagccaaatattgaacctcctgagaatgtggagtggagtggtgctgaagcctcaatgtttagagtcctcattggcacttactatgacaatttctgtgccattgctaggttaattgggaccaaaacatgtagacaggtgtatgagtttagagtcaaagaatctagcatcatagctccagctcccgctgaggatgtggatactcctccaaggaaaaagaagaggaaacaccggttgtgggctgcacactgcagaaagatacagctgaaaaaggacggctcctctaaccatgtttacaactatcaaccctgtgatcatccacggcagccttgtgacagttcgtgcccttgtgtgatagcacaaaatttttgtgaaaagttttgtcaatgtagttcagagtgtcaaaaccgctttccgggatgccgctgcaaagcacagtgcaacaccaagcagtgcccgtgctacctggctgtccgagagtgtgaccctgacctctgtcttacttgtggagccgctgaccattgggacagtaaaaatgtgtcctgcaagaactgcagtattcagcggggctccaaaaagcatctattgctggcaccatctgacgtggcaggctgggggatttttatcaaagatcctgtgcagaaaaatgaattcatctcagaatactgtggagagattatttctcaagatgaagctgacagaagagggaaagtgtatgataaatacatgtgcagctttctgttcaacttgaacaatgattttgtggtggatgcaacccgcaagggtaacaaaattcgttttgcaaatcattcggtaaatccaaactgctatgcaaaagttatgatggttaacggtgatcacaggataggtatttttgccaagagagccatccagactggcgaagagctgttttttgattacagatacagccaggctgatgccctgaagtatgtcggcatcgaaagagaaatggaaatcccttgacatctgctacctcctccccctcctctgaaacagctgccttagcttcaggaacctcgagtactgtgggcaatttagaaaaagaacatgcagtttgaaattctgaatttgcaaagtactgtaagaataatttatagtaatgagtttaaaaatcaactttttattgccttctcaccagctgcaaagtgttttgtaccagtgaatttttgcaataatgcagtatggtacatttttcaactttgaataaagaatacttgaacttgtcaaaaaaaa

SEQ ID NO: 89 - DNA, 598 bp, Homo sapiens
  misc_feature (1)..(598): n = a, t, g, or c
gattttttttcacgtttaatgtaaaaatgatctcgtgacatttacatactaagtattaggcattacataatattaattttgatggctatgttacatcatctaaaaataatatgacaattggtggcatagtatgtgtttttcaaaactgctgtaaaacagaaatagtgtgaactcaaatacatattgctgaagggatgaggatcgctcttaaatgcctggatggcatgaactttacatattagcatggtaagaaattactaaatcttttcttttcctgtattaaaataatgaggatctaagacacattaaatcaaaatatttacaaaaatttaataatgttttagaccaaagaaaaaaaggacaaattaaagaaatcattcttattctaaatttaanttttttaatgttagntctcagttttcttagcttttttttctgttggttctttgaaacaagcattgtaaagactttntaataatacaatagcttttaaactcttagtgaaaatggaaagggtgctttttatagtagcctctggcactcttcattaggctgggtacaaagcaacaagtattctagtatctgaaaaatctcctgt

SEQ ID NO: 90 - DNA, 578 bp, Homo sapiens
tttttttttttactcaaagtgtcctttattctttatcattctatttgagttttattgtttttacacagctgggaaatgcttaaggtacaaattaataaattttaaactcagtatggaaaatacatttaataaattaaagcaaaaaccaaagatctgaggagatccaagagatcaagacaatctgtaaccagagtctgaagtatccaaggagctactctttttgaggcatattctcctcagcttccagttatcatttgataaacacatcagcaaaaggttcagtgttttaaacaaatgtagactttattttgtactgtacaaagtgctaatgtcagtagatccattaaaatatagaatatttaagaaagatcattaataaaagtaatggtcattcaatttaatgttacagtttacagcgttttactctagtgttttaagtcagcatgagcagtatcaaagtacttatgtagctagtttctaaaactttacagaaaacccagtacaattccaagtgcttatagccaatataagcatatttcatattagaaatagttatccatatgttaacaagaaactat

SEQ ID NO: 91 - DNA, 828 bp, Homo sapiens
  misc_feature (1)..(828): n = a, t, g, or c
atgaatgcggctgttaagacctgcaataatccagaatggctactctgatctatgttgataaggaaaatggagaaccaggcacccgtgtggttgctaaggatgggctgaagctggggtctggaccttcaatcaaagccttagatgggagatctcaagtttcaacaccacgttttggcaaaacgttcgatgccccaccagccttacctaaagctactagaaaggctttgggaactgtcaacagagctacagaaaagtctgtaaagaccaagggacccctcaaacaaaaacagccaagcttttctgccaaaaagatgactgagaagactgttaaagcaaaaagctctgttcctgcctcagatgatgcctatccagaaatagaaaaattctttcccttcaatcctctagactttgagagttttgacctgcctgaagagcaccagattgcgcacctccccttgagtggagtgcctctcatgatccttgacgaggagagagagcttgagaagctgtttcagctggccccccttcacctgtgaagatgccgtctccacgatgggaatcaatcatgtgcagtctcgttcaagcatctgtcgacttgggatgtgatttggcactgttgctgtgcatagatatttaatgcntagtgttcagagtttgtggtgattgtattgtagagcatcttaacagatcgtaaagaaccaattaagcaattaaacaagtcctaatagagccgagatagtcgttgtgaggtattacctgaatcggcgttaaaggtggagggaacatggtccatagtcttgtggactcgtgtgtgtggttgtagcggct

SEQ ID NO: 92 - DNA, 489 bp, Homo sapiens
tttttgttggtggctgtgattacctttattagtttacaaataaaaaagttaaaaagaaatactgtgtttagggtaaggtaacagtttcatctaatcagaggagagtgaagaggaggcgctgccttctaggtgctgtgacttctccttttcgtgattcttctccaccttggtcaacatcttccccgctatgctggaattacttcggtgttctgcggtggccatggtgaacatctgatgaactgaaattccatcggaatgcacaggaagatatagttgatcttcaaaaatgtcctttccaggaccaccatactggggaagttctttcgggtgcctgcgaatgggctgcagcctggggctgggcccgagctctagctctgtcatgccatcgccactgaaatcggtttccagatgattagtctcttcatgccccgtccatttttcggtttttctccagtgttcagaattcaaatgattaacttctggaatgtc

SEQ ID NO: 93 - DNA, 513 bp, Homo sapiens
taatatttaaaatctttattaacccaaattagaattataaaaatgtttgtctcaaaaacaatgactgtgatactcaagtacagaattgtggtgcagccagaagtggttcaagagccctcccgcaaatcatgacttgcactctggcttttaagtgaagacaagggaatctcaaggcagatgggaggagggcatttgaagaaaacaaagatgacaaaaaagatgggaaggacacaatggttaagtaagtttcttgtcagatacaataaactatttttaggaaggataaaattaaaagtgcttaatacaaacaaaatttaacgctgctaattattcttaagtgccataaaacattagttaccaaaataactttattaagagttggccaaacttcaactattattactattactacagggtcttgttctagcaaagttccaatatttatcagttatcttacacatgacatttatcttaatatgtacataaatatcaggaaagtttaaatacttttat

SEQ ID NO: 94 - DNA, 652 bp, Homo sapiens
  misc_feature (1)..(652): n = a, t, g, or c
tgactttgctgatggtttattaccttaaggaaaagacttacacagagaaattgagcaatgaaaacccttcacattgagcaaacacattccacgctacacaaatcatgagaaaaatgagaactgttgtgaaacatgacagattgcccaagtgttatttttcctctattggaaaattctaagacgtttcctcatgtgtagtttttcagtcacaaaaatggcagtaggaatatttaaatattaaatcacagtttgaaaatagatacatacatacatatatatacacacacagagatacatagttgacttatgattcccagatatgcagggttatcattgtgactgcttggatcaagacaagtttgtaaaaagcagcgacatagttcaacataatagtcaggagctagattacttccctgtaattgctatgcacacacagtacaaggctagcgagattatagacaatctgtcttcgaatctactatcttgataattctgaatcttttcaagttaaaattgcagctattgtcagtaagcgcccctataaaggtcaggcctttgantgggggacgataactngcgtcaccaggagagaggcncggttcaacttccnggttccgtctggcngcggtcacagccggnaacctgggtcccg

SEQ ID NO: 95 - DNA, 669 bp, Homo sapiens
  misc_feature (1)..(669): n = a, t, g, or c
tcatatccagcacaaaaactatttctggctgaatagcacagaaaagtattttaacctacctgtagagatcctcgtcatggaaaggtgccaaactgttttgaatggaaggacaagtaagagtgaggccacagttcccaccacacgagggcttttgtattgttctactttttcagccctttactttctggctgaagcatccccttggagtgccatgtataagttgggctattagagttcatggaacatagaacaaccatgaatgagtggcatgatccgtgcttaatgatcaagtgttacttatctaataatcctctagaaagaaccctgttagatcttggtttgtgataaaaatataaagacagaagacatgaggaaaaacaaaaggtttgaggaaatcaggcatatgactttatacttaacatcagatcttttctataatatcctactactttggttttcctagctccataccacacacctaaacctgtattatgaattacatattacaaagtcataaatgtgccatatggatatcagtacattctagttggaatcgtttctctgctagaattaggtgtgagatttttgttnccaggtatancaggcntatggttggtggcataaattggtctttaaatgcttggtggnctttgtaacagattnctctga

SEQ ID NO: 96 - DNA, 739 bp, Homo sapiens
tcctggtaattaaaagttgggtgtattttctttacctccaaggaaagaactactagctacaaaaaatatttggaataagcatgtttggtataaggtacatatttggttgaagacaccagactgaagtaaacagctgtgcatccaatttattatagtttgtaagtaacaatatgtaatcaaacttctaggtgacttgagagtggaacctcctatatcattatttagcaccgttgtgacagtaaccatttcaggtatgtttattataccacttatatcaacttatttttcaccaggttaaaattttaatttctacaaaataacattctgaatcaagcacactgtatgttcagtaggttgaactatgaacactgtcaccaatgttcagttcaaaagcctgaaagtttagatctagaagctggtaaaaatgacaatatcaatcacattaggggaaccattgttgtcttcacttaatccatttagcactatttaaaataagcccaccaagttatatgactaatataactttgaaaattttttatactgaggggttggtgataactcttgaggatgtaatgcttaataaacatcaatcatcatttctacttgtcttccatgtgtcgggaactgtacaatgttactgtgaacctgtctctactttgaaattgatgtagggtggtgaccaagtgtctcgactattgttaagcaggatcatcaaaaacggtttcaccaccttctaacg

SEQ ID NO: 97 - DNA, 2199 bp, Homo sapiens
ctggtctgatcggacttctcgtcctgggacacagtttactggagtctggccggctctccgtgctcctcttggtacctcattttggggagaaccttaaacccactcgagcagataatctccgccttgaccggtgccaccaaagaagccttggaaccatgtggacttttctgggcattgccactttcacctatttttataagaagttcggggacttcatcactttggccaacagggaggtcctgttgtgcgtgctggtgttcctctcgctgggcctggtgctctcctaccgctgtcgccaccgaaacgggggtctcctcgggcgccagcagagcggctcccagttcgccctcttctcggatattctctcaggcctgcctttcattggcttcttctgggccaaatccccccctgaatcagaaaataaggagcagctcgaggccaggaggcgcagaaaaggaaccaatatttcagaaacaagcttaataggaacagctgcctgtacatcaacatcttctcagaatgacccagaagttatcatcgtgggagctggcgtgcttggctctgctttggcagctgtgctttccagagatggaagaaaggtgacagtcattgagagagacttaaaagagcctgacagaatagttggagaattcctgcagccgggtggttatcatgttctcaaagaccttggtcttggagatacagtggaaggtcttgatgcccaggttgtaaatggttacatgattcatgatcaggaaagcaaatcagaggttcagattccttaccctctgtcagaaaacaatcaagtgcagagtggaagagctttccatcacggaagattcatcatgagtctccggaaagcagctatggcagagcccaatgcaaagtttattgaaggtgttgtgttacagttattagaggaagatgatgttgtgatgggagttcagtacaaggataaagagactggagatatcaaggaactccatgctccactgactgttgttgcagatgggcttttctccaagttcaggaaaagcctggtctccaataaagtttctgtatcatctcattttgttggctttcttatgaagaatgcaccacagtttaaagcaaatcatgctgaacttattttagctaacccgagtccagttctcatctaccagatttcatccagtgaaactcgagtacttgttgacattagaggagaaatgccaaggaatttaagagaatacatggttgaaaaaatttacccacaaatacctgatcacctgaaagaaccattcttagaagccactgacaattctcatctgaggtccatgccagcaagcttccttcctccttcatcagtgaagaaacgaggtgttcttcttttgggagacgcatataatatgaggcatccacttactggtggaggaatgactgttgcttttaaagatataaaactatggagaaaactgctaaagggtatccctgacctttatgatgatgcagctattttcgaggccaaaaaatcattttactgggcaagaaaaacatctcattcctttgtcgtgaatatccttgctcaggctctttatgaattattttctgccacagatgattccctgcatcaactaagaaaagcctgttttctttatttcaaacttggtggcgaatgtgttgcgggtcctgttgggctgctttctgtattgtctcctaaccctctagttttaattggacacttctttgctgttgcaatctatgccgtgtatttttgctttaagtcagaaccttggattacaaaacctcgagcccttctcagtagtggtgctgtattgtacaaagcgtgttctgtaatatttcctctaatttactcagaaatgaagtatatggttcattaagcttaaaggggaaccatttgtgaatgaatatttggaacttaccaagtcctaagagacttttggaagaggatatatatagcatagtaccataccacttataaagtggaaactcttggaccaagattaggattaatttgtttttgaagttttttgtatataaatatgtaaatacatgctttaatttgcaatttaaaatgaaggggttaaataagttagacatttaaaagaaatgattgttaccataaattagtgctaatgctgaggagaactacagtttttcttttgaatttagtatttgagatgagttgttgggacatgc

SEQ ID NO: 98 - DNA, 2648 bp, Homo sapiens
ggcacagggcgaggttttatacacctgaaagaagagaatgtcaagacgaagtagccgtttacaagctaagcagcagccccagcccagccagacggaatccccccaagaagcccagataatccaggccaagaagaggaaaactacccaggatgtcaaaaaaagaagagaggaggtcaccaagaaacatcagtatgaaattaggaattgttggccacctgtattatctggggggatcagtccttgcattatcattgaaacacctcacaaagaaataggaacaagtgatttctccagatttacaaattacagatttaaaaatctttttattaatccttcacctttgcctgatttaagctggggatgttcaaaagaagtctggctaaacatgttaaaaaaggagagcagatatgttcatgacaaacattttgaagttctgcattctgacttggaaccacagatgaggtccatacttctagactggcttttagaggtatgtgaagtatacacacttcatagggaaacattttatcttgcacaagacttttttgatagatttatgttgacacaaaaggatataaataaaaatatgcttcaactcattggaattacctcattattcattgcttccaaacttgaggaaatctatgctcctaaactccaagagtttgcttacgtcactgatggtgcttgcagtgaagaggatatcttaaggatggaactcattatattaaaggctttaaaatgggaactttgtcctgtaacaatcatctcctggctaaatctctttctccaagttgatgctcttaaagatgctcctaaagttcttctacctcagtattctcaggaaacattcattcaaatagctcagcttttagatctgtgtattctagccattgattcattagagttccagtacagaatactgactgctgctgccttgtgccattttacctccattgaagtggttaagaaagcctcaggtttggagtgggacagtatttcagaatgtgtagattggatggtaccttttgtcaatgtagtaaaaagtactagtccagtgaagctgaagacttttaagaagattcctatggaagacagacataatatccagacacatacaaactatttggctatgctggaggaagtaaattacataaacaccttcagaaaagggggacagttgtcaccagtgtgcaatggaggcattatgacaccaccgaagagcactgaaaaaccaccaggaaaacactaaagaagataactaagcaaacaagttggaattcaccaagattgggtagaactggtatcactgaactactaaagttttacagaaagtagtgctgtgattgattgccctagccaattcacaagttacactgccattctgattttaaaacttacaattggcactaaagaatacatttaattatttcctatgttagctgttaaagaaacagcaggacttgtttacaaagatgtcttcattcccaaggttactggatagaagccaaccacagtctataccatagcaatgtttttcctttaatccagtgttactgtgtttatcttgataaactaggaattttgtcactggagttttggactggataagtgctaccttaaagggtatactaagtgatacagtactttgaatctagttgttagattctcaaaattcctacactcttgactagtgcaatttggttcttgaaaattaaatttaaacttgtttacaaaggtttagttttgtaataaggtgactaatttatctatagctgctatagcaagctattataaaacttgaatttctacaaatggtgaaatttaatgttttttaaactagtttatttgccttgccataacacattttttaactaataaggcttagatgaacatggtgttcaacctgtgctctaaacagtgggagtaccaaagaaattataaacaagataaatgctgtggctccttcctaactggggctttcttgacatgtaggttgcttggtaataacctttttgtatatcacaatttgggtgaaaaacttaagtaccctttcaaactatttatatgaggaagtcactttactactctaagatatccctaaggaatttttttttttaatttagtgtgactaaggctttatttatgtttgtgaaactgttaaggtcctttctaaattcctccattgtgagataaggacagtgtcaaagtgataaagcttaacacttgacctaaacttctattttcttaaggaagaagagtattaaatatatactgactcctagaaatctatttattaaaaaaagacatgaaaacttgctgtacataggctagctatttctaaatattttaaattagcttttctaaaaaaaaaatccagcctcataaagtagattagaaaactagattgctagtttattttgttatcagatatgtgaatctcttctccctttgaagaaactatacatttattgttacggtatgaagtcttctgtatagtttgtttttaaactaatatttgtttcagtattttgtctgaaaagaaaacaccactaattgtgtacatatgtattatataaacttaaccttttaatactgtttatttttagcccattgtttaaaaaataaaagttaaaaaaatttaaaaa

SEQ ID NO: 99 - DNA, 566 bp, Homo sapiens
attcggcaacacgggaaaacccggagctgctgaaccctgagcccagagagactgagcccagagttgaggctactgcctaatatgatcactctgggcgacgcgatgcacaacttcgccgacgggctggccgtggcgccgccttcgcgatcctcctggaagaccgggctggcaacctcgctggccgtgttctgccacgagttgccacacgagctgggggacttcgccgccttgctgcacgcggggctgtccgtgcgccaagcactgctgctgaacctggcctccgcgctcacggccttcgctggtctctacgtggcactcgcggttggagtcagcgaggagagcgaggcctggatcctggcagtggccaccggctgtttacctctacgtagcactctgcgacatgctcccggcgatgttgaaagtacgggacccgcggccctggctcctcttcctgctgcacaacgtgggcctgctgggcggctggaccgtcctgctgctgctgtccctgtacgaggatgacatcaccttctgataccctgccctagtcccccacctttgacttaaga

SEQ ID NO: 100 - DNA, 499 bp, Homo sapiens
actttgtgtgttgtgttttattaacaccaaaatgtgccacatcatggtttagaagaggtggagggtgcaggcaggaggctccgaaggcccaggcagggccgccagcctctggcctctccatggactccagctggagagcctgtccgctcagcaacaccccaggcagcaccaagaataacatgcccacaagaacatcatggccaagagacgcacaggcgcatcccgcttccaggcacctttcccacctggccagaagtccctgctgtcatcccgacttgcacggtggttttggtaaccagtgggctgtgcaggagtgaaagtggggtcactttccttcctttcccagctgctggagtcggaactgctgcctttgtttggcggccttgtttcttaaatcagttccctcttaggatttattacactaaaaaaaaaattagtttttgaaaagaaataggagaatacagaaacatgaatttcacgaggctatcatctaacagtg

SEQ ID NO: 101 - DNA, 378 bp, Homo sapiens
  misc_feature (1)..(378): n = a, t, g, or c
taaatagtattttgtttaatctgatacatccaagatattgtcattttaatatgcaataaaaaatgattgattcgatatttgcatccttcacaacctaccatgtagtttacactcagagcccagctcagtctcacagcaagcaccagcggcccccgtgctggacagcatggctaatgggaggagctgacccgtcagaggcaccaaggtcacgctgtgacaanggctgtggtgacgcaaaggcagcgggtttcctggcacagcctggacggtgcaccagcctgtcctgtgtgctctgcataatgtcggtacagcagttggtcacagagctttgcaccagatgctnattccagcccacctaaggggggttcagggaagtgg

SEQ ID NO: 102 - DNA, 401 bp, Homo sapiens
  misc_feature (1)..(401): n = a, t, g, or c
tttttttttttttttttttttttttttttttttttttttcccaaccaagggagctgtttatttgacagggaaggaatttgaggagccgggttagtcctggcccaaaacaggcagggggaggggggggcggggggtctttgatgggggcctaaaaaactgcctttcccctaataggcggactccccggggggccacgcttgggctgcaccttaaggtttaatngaagtccaccccaccagctggttttttacttttgaacccggggttgatgagcgactttcctggacaccgcctcctgactccaggtccagggccacctttttggggatctgggtctggaaaaaaaagctgaggccctgcaggccgggggcttttcctcgggctgacagctgttttttttg

SEQ ID NO: 103 - DNA, 237 bp, Homo sapiens
ttttttttaagactggacttgctttatattaaatttgtaaaagtgtgcactggcagcagcctgggcggggctggggtggagcccggggtctgcttgggcctgagcgctcaccccagctggggacaggccccgtggttttcaggcacaagacggtagcccggcctccagcaaccctaaacagctgggctgctgccctcttcctcctcctcagcccagagggtctcccaggaccctgag

SEQ ID NO: 104 - DNA, 337 bp, Homo sapiens
cttttttttttttttttttttgagctcaaagagagttctcattttccctattcaaactaatacccatgccgtgttttttaccttggatttaaagtcaccttaggttggggcaacagattctcactcatgtttaagatcttgttatttcagcttcataagatcaaagaggagtctttcccttttctcttttaccctcaggattctcatcccttacagctgactcttccaggcaatttccatagatctgcagtcctgcctctgccacagtctctctgttgtccccacatctacccaacttcctgtactgttgcccttctgtcgtcttctcgcagccgta

SEQ ID NO: 105 - DNA, 1686 bp, Homo sapiens; identical to SEQ ID NO: 2

SEQ ID NO: 106 - DNA, 2314 bp, Homo sapiens
taggtctcagagtttgcttttaagaagtagtacaagaaggaatagttatatcaatacaccagtggctgaaattatcatgaaaccaaatgttggacaaggcagcacaagtgtgcaaacagctatggaaagtgaactcggagagtctagtgccacaatcaataaaagactctgcaaaagtacaatagaactttcagaaaattctttacttccagcttcttctatgttgactggcacacaaagcttgctgcaacctcatttagagagggttgccatcgatgctctacagttatgttgtttgttacttcccccaccaaatcgtagaaagcttcaacttttaatgcgtatgatttcccgaatgagtcaaaatgttgatatgcccaaacttcatgatgcaatgggtacgaggtcactgatgatacataccttttctcgatgtgtgttatgctgtgctgaagaagtggatcttgatgagcttcttgctggaagattagtttctttcttaatggatcatcatcaggaaattcttcaagtaccctcttacttacagactgcagtggaaaaacatcttgactacttaaaaaagggacatattgaaaatcctggagatggactatttgctcctttgccaacttacccatactgtaagcagattagtgctcaggagtttgatgagcaaaaagtttctacctctcaagctgcaattgcagaacttttagaaaatattattaaaaacaggagtttacctctaaaggagaaaagaaaaaaactaaaacagtttcagaaggaatatcctttgatatatcagaaaagatttccaaccacggagagtgaagcagcactttttggtgacaaacctacaatcaagcaaccaatgctgattttaagaaaaccaaagttccgtagtctaagataactaactgaattaaaaattatgtaatacttgtggaactttgataaatgaagccatatctgagaatgtagctactcaaaaggaagtctgtcattaataaggtatttctaaataaacacattatgtaaggaagtgccaaaatagttatcaatgtgagactcttaggaaactaactagatctcaattgagagcacataacaatagatgataccaaatactttttgtttttaacacagctatccagtaaggctatcatgatgtgtgctaaaattttatttacttgaattttgaaaactgagctgtgttagggattaaactataattctgttcttaaaagaaaatttatctgcaaatgtgcaagttctgagatattagctaatgaattagttgtttggggttacttctttgtttctaagtataagaatgtgaagaatatttgaaaactcaatgaaataattctcagctgccaaatgttgcactcttttatatattctttttccacttttgatctatttatatatatgtatgtgtttttaaaatatgtgtatattttatcagatttggttttgccttaaatattatccccaattgcttcagtcattcatttgttcagtatatatattttgaattctagttttcataatctattagaagatggggatataaaagaagtataaggcaatcatatattcattcaaaagatatttatttagcaactgctatgtgcctttcgttgttccagatatgcagagacaatgataaataaaacatataatctcttccataaggtatttattttttaatcaagggagatacacctatcagatgtttaaaataacaacactacccactgaaatcagggcatatagaatcattcagctaaagagtgacttctatgatgatggaacaggtctctaagctagtggttttcaaactggtacacattagactcacccgaggaattttaaaacagcctatatgcccagggcctaacttacactaattaaatctgaattttggggatgttgtatagggattagtattttttttaatctaggtgattccaatattcagccaactgtgagaatcaatggcctaaatgctttttataaacatttttataagtgtcaagataatggcacattgactttattttttcattggaagaaaatgcctgccaagtataaatgactctcatcttaaaacaaggttcttcaggtttctgcttgattgacttggtacaaacttgaagcaagttgccttctaatttttactccaagattgtttcatatctattccttaagtgtaaagaaatatataatgcatggtttgtaataaaatcttaatgtttaatgactgaaaaaaaaaaaaaaaaaaaaaaaaaaaaaaaaaaaaaaaaaaaaa

SEQ ID NO: 107 - DNA, 744 bp, Homo sapiens
  misc_feature (1)..(744): n = a, t, g, or c
caacattaaatgactatttatttttcaggtttaaaagatttcaaaatacatatgtacaagataaataaactacacaaaaattatgtcatcaaatatatttaaaaaaaaattcaaggtaggcaacttagatcaccttggcaaagaacacattaactaagatgaaccaggacaagtcccctaaacatcaggatgaaatttcttttctatgcctactagctgactggccttccttttctgtgttgagttgtgtactctggagtcaccagcctctggtagattatcaagcatctcttcctcatcagccttttgtttctgtcttgcatgcttctctgtccactgtctggcattcttgaggaaggctggcttattatatttaaattctgaggatatgtcagccatgagcgggtcatcagggttgggttctgacatgagcagctgaatagaggtcaacacagttgcgatgttgagggatggtctccaagcaccttttggtggcaatttgagaacatccagacaaatccttccagcagaatcaatgtntggatgataaattggagtgagaaatcggatctgaggaggttcaaatgggtacctttcaagaatgattactgttagcttaaaaacacccttctcataaggtgtggttgctccaactaatatttgagctcgcaagtcatccatttggtcttatcttggcaacatgtgatggccgggggtggtctgtggcaacatgtgcactatctc

SEQ ID NO: 108 - DNA, 2740 bp, Homo sapiens; identical to SEQ ID NO: 5

SEQ ID NO: 109 - DNA, 10211 bp, Homo sapiens; identical to SEQ ID NO: 6

SEQ ID NO: 110 - DNA, 1836 bp, Homo sapiens; identical to SEQ ID NO: 7

SEQ ID NO: 111 - DNA, 478 bp, Homo sapiens; identical to SEQ ID NO: 8

SEQ ID NO: 112 - DNA, 492 bp, Homo sapiens; identical to SEQ ID NO: 9
  misc_feature (1)..(492): n = a, t, g, or c

SEQ ID NO: 113 - DNA, 415 bp, Homo sapiens; identical to SEQ ID NO: 10
  misc_feature (1)..(415): n = a, t, g, or c

SEQ ID NO: 114 - DNA, 879 bp, Homo sapiens; identical to SEQ ID NO: 11
  misc_feature (1)..(879): n = a, t, g, or c

SEQ ID NO: 115 - DNA, 281 bp, Homo sapiens; identical to SEQ ID NO: 12
  misc_feature (1)..(281): n = a, t, g, or c

SEQ ID NO: 116 - DNA, 463 bp, Homo sapiens; identical to SEQ ID NO: 13
  misc_feature (1)..(463): n = a, t, g, or c

SEQ ID NO: 117 - DNA, 479 bp, Homo sapiens
  misc_feature (1)..(479): n = a, t, g, or c
ggtgtaaagattcagttaaaaaatatcttccttcagacatctgctgactacaggaaattattgtcatagcccatgtgaaggtcataatgagactaagatgacgttttaaaactcctgaactctgtagggaaaagcaagtagaagctattattcttactcgctggtaacatactgtagatagctccaggactgagacccgaggcccggaggacacgcttagtgttctccctatgtcacagtnctacaggccagcaaaagtgagtacaactgtcccagcatgtcagttacacatactggccctaaatgttcagcataatttaaaagggaaagaaaaaagttggcttttcagacaaaattttgtgtgaactgaacaacgtcagactatgcttctttgggtccaaataattttaactttacagctctcagatgttctggcagctcattctttgttcatttcacctattatacaagtgtttctg

SEQ ID NO: 118 - DNA, 4036 bp, Homo sapiens; identical to SEQ ID NO: 14

SEQ ID NO: 119 - DNA, 762 bp, Homo sapiens
  misc_feature (1)..(762): n = a, t, g, or c
gtaaaaacttgtttttaattttgtataaaataaaggtggtccatgcccacgggggctgtaggaaatccaagcagaccagctggggtggggggatgtagcctacctcgggggactgtctgtcctcaaaacgggctgagaaggcccgtcaggggcccaggtcccacagagaggcctgggatactcccccaacccgaggggcagactgggcagttggggagcccncatcgtgccccagaggtggccacaggctgaaggaggggcctgaggcaccgcagcctgcaacccccagggctgcagtccactaactttttacagaataaaaggaacatggggatggggaaaaaagcaccaggtcaggcagggcccgagggccccagatcccaggagggccaggactcaggatgccagcaccaccctagcagctcccacagctcctggcacaggaggccgccacggattggcacaggccgctgctggccatcacgccacatttggagaacttgtcccgacagaggtcagctcggaggagctcctcgtgggcacacactgtacgaacacagatctccttgttaatgacgtacacacggcggaggctgtagaacagacctcgttgagacactgtttgcaaggcctgtgtatggaatagaagcgggttgcacggtactgttncttacggcagacaagaagtccaagcttttgggctccaactatacatttactgattctgggtaggggcttggatgcttcctgttgcacttgttc

SEQ ID NO: 120 - DNA, 473 bp, Homo sapiens
  misc_feature (1)..(473): n = a, t, g, or c
ctttctagtgtagataagactatcaaaaataaaatatttttcaaaaaccagctgatccaacatagtgaactacttctggttgagagccctggtctaagttaataaatttcctttaaggctatttatatttttttcaaatataagactaacatttatttttaaactaattagaatatattggctgggcactcttgcctcattagctcttgcccaaagtgctgggaattacaggtatgagccaccacactcagcctgcttctgagttttatgtctagttttctatagctcaagattaaaaataaaaactcttaccttataccatgcataaatcaaagggctaaacattaaaattaatgctataactaactacattaggaggaaatgcngttgccntatttgggttttttggnttacccttttccnggggtatcagtttgtctttaaantggccnggatccgacctatngctgttt

SEQ ID NO: 121 - DNA, 561 bp, Homo sapiens
tgagacagtctcactctgttgcccaggctgtggtgcagtggtgtgatctcagctccctgcaaccagataattcttaatgacaatattcttacttgtatttttcaaaaaagaagggtattcttagcctgtctattacttttgtagttaaccattcttttattattattttagctacaacttcttttcttaattctgagaaagggcagttataaaagaagaacaggttggcttaagctagtgcttaagactgtatgtgaagcccttcaggtattgtttaaaaatcaaacagtgcattgtataaggacgtgtacatggtaaaacactaaagaaaaacaaggcgacaattaacaagaaattcaggacagcaagaagctgtggatatggttgacagggaagaagtggatgcctctgggaaggctttgacggttctagtaacattctgttcctcacactgggtggagagtatacaggtgttcattttatttattatgctttaaaatgtacatgtacactacctatcttcttttgtatgtatgatatgcttcacgattaaaggaaatg

SEQ ID NO: 122 - DNA, 553 bp, Homo sapiens; identical to SEQ ID NO: 15
  misc_feature (1)..(553): n = a, t, g, or c

SEQ ID NO: 123 - DNA, 780 bp, Homo sapiens
cgggatctaccataccattgactaactatggaagattataccaaaatagagaaaattggagaaggtacctatggagttgtgtataagggtagacacaaaactacaggtcaagtggtagccatgaaaaaaatcagactagaaagtgaagaggaaggggttcctagtactgcaattcgggaaatttctctattaaaggaacttcgtcatccaaatatagtcagtcttcaggatgtgcttatgcaggattccaggttatatctcatctttgagtttctttccatggatctgaagaaatacttggattctatccctcctggtcagtacatggattcttcacttgttaaggtagtaacactctggtacagatctccagaagtattgctggggtcagctcgttactcaactccagttgacatttggagtataggcaccatatttgctgaactagcaactaagaaaccacttttccatggggattcagaaattgatcaactcttcaggattttcagagctttgggcactcccaataatgaagtgtggccagaagtggaatctttacaggactataagaatacatttcccaaatggaaaccaggaagcctagcatcccatgtcaaaaacttggatgaaaatggcttggatttgctctcgaaaatgttaatctatgatccagccaaacgaatttctggcaaaatggcactgaatcatccatattttaatgatttggacaatcagattaagaagatgtagctttctgacaaaaagtttccatatgttatg

SEQ ID NO: 124 - DNA, 1658 bp, Homo sapiens; identical to SEQ ID NO: 17

SEQ ID NO: 125 - DNA, 4858 bp, Homo sapiens
agactccggcccctgtcggccgccaagcccctccgcccctcacagcgcccaggtccgcggccgggccttgattttttggcggggaccgtcatggcgtcgcagccaaattcgtctgcgaagaagaaagaggagaaggggaagaacatccaggtggtggtgagatgcagaccatttaatttggcagagcggaaagctagcgcccattcaatagtagaatgtgatcctgtacgaaaagaagttagtgtacgaactggaggattggctgacaagagctcaaggaaaacatacacttttgatatggtgtttggagcatctactaaacagattgatgtttaccgaagtgttgtttgtccaattctggatgaagttattatgggctataattgcactatctttgcgtatggccaaactggcactggaaaaacttttacaatggaaggtgaaaggtcacctaatgaagagtatacctgggaagaggatcccttggctggtataattccacgtacccttcatcaaatttttgagaaacttactgataatggtactgaattttcagtcaaagtgtctctgttggagatctataatgaagagctttttgatcttcttaatccatcatctgatgtttctgagagactacagatgtttgatgatccccgtaacaagagaggagtgataattaaaggtttagaagaaattacagtacacaacaaggatgaagtctatcaaattttagaaaagggggcagcaaaaaggacaactgcagctactctgatgaatgcatactctagtcgttcccactcagttttctctgttacaatacatatgaaagaaactacgattgatggagaagagcttgttaaaatcggaaagttgaacttggttgatcttgcaggaagtgaaaacattggccgttctggagctgttgataagagagctcgggaagctggaaatataaatcaatccctgttgactttgggaagggtcattactgcccttgtagaaagaacacctcatgttccttatcgagaatctaaactaactagaatcctccaggattctcttggagggcgtacaagaacatctataattgcaacaatttctcctgcatctctcaatcttgaggaaactctgagtacattggaatatgctcatagagcaaagaacatattgaataagcctgaagtgaatcagaaactcaccaaaaaagctcttattaaggagtatacggaggagatagaacgtttaaaacgagatcttgctgcagcccgtgagaaaaatggagtgtatatttctgaagaaaattttagagtcatgagtggaaaattaactgttcaagaagagcagattgtagaattgattgaaaaaattggtgctgttgaggaggagctgaatagggttacagagttgtttatggataataaaaatgaacttgaccagtgtaaatctgacctgcaaaataaaacacaagaacttgaaaccactcaaaaacatttgcaagaaactaaattacaacttgttaaagaagaatatatcacatcagctttggaaagtactgaggagaaacttcatgatgctgccagcaagctgcttaacacagttgaagaaactacaaaagatgtatctggtctccattccaaactggatcgtaagaaggcagttgaccaacacaatgcagaagctcaggatatttttggcaaaaacctgaatagtctgtttaataatatggaagaattaattaaggatggcagctcaaagcaaaaggccatgctagaagtacataagaccttatttggtaatctgctgtcttccagtgtctctgcattagataccattactacagtagcacttggatctctcacatctattccagaaaatgtgtctactcatgtttctcagatttttaatatgatactaaaagaacaatcattagcagcagaaagtaaaactgtactacaggaattgattaatgtactcaagactgatcttctaagttcactggaaatgattttatccccaactgtggtgtctatactgaaaatcaatagtcaactaaagcatattttcaagacttcattgacagtggccgataagatagaagatcaaaaaaaggaactagatggctttctcagtatactgtgtaacaatctacatgaactacaagaaaataccatttgttccttggttgagtcacaaaagcaatgtggaaacctaactgaagacctgaagacaataaagcagacccattcccaggaactttgcaagttaatgaatctttggacagagagattctgtgctttggaggaaaagtgtgaaaatatacagaaaccacttagtagtgtccaggaaaatatacagcagaaatctaaggatatagtcaacaaaatgacttttcacagtcaaaaattttgtgctgattctgatggcttctcacaggaactcagaaattttaaccaagaaggtacaaaattggttgaagaatctgtgaaacactctgataaactcaatggcaacctggaaaaaatatctcaagagactgaacagagatgtgaatctctgaacacaagaacagtttatttttctgaacagtgggtatcttccttaaatgaaagggaacaggaacttcacaacttattggaggttgtaagccaatgttgtgaggcttcaagttcagacatcactgagaaatcagatggacgtaaggcagctcatgagaaacagcataacatttttcttgatcagatgactattgatgaagataaattgatagcacaaaatctagaacttaatgaaaccataaaaattggtttgactaagcttaattgctttctggaacaggatctgaaactggatatcccaacaggtacgacaccacagaggaaaagttatttatacccatcaacactggtaagaactgaaccacgtgaacatctccttgatcagctgaaaaggaaacagcctgagctgttaatgatgctaaactgttcagaaaacaacaaagaagagacaattccggatgtggatgtagaagaggcagttctggggcagtatactgaagaacctctaagtcaagagccatctgtagatgctggtgtggattgttcatcaattggcggggttccatttttccagcataaaaaatcacatggaaaagacaaagaaaacagaggcattaacacactggagaggtctaaagtggaagaaactacagagcacttggttacaaagagcagattacctctgcgagcccagatcaacctttaattcacttgggggttggcaattttatttttaaagaaaacttaaaaataaaacctgaaaccccagaacttgagccttgtgtatagattttaaaagaatatatatatcagccgggcgcggtggctcatgcctgtaatcccagcactttgggaggctgaggcgggtggattgcttgagcccaggagtttgagaccagcctggccaacgtggcaaaacctcgtctctgttaaaaattagccgggcgtggtggcacactcctgtaatcccagctactggggaggctgaggcacgagaatcacttgaacccaggaagcggggttgcagtgagccaaaggtacaccactacactccagcctgggcaacagagcaagactcggtctcaaaaacaaaatttaaaaaagatataaggcagtactgtaaattcagttgaattttgatatctacccatttttctgtcatccctatagttcactttgtattaaattgggtttcatttgggatttgcaatgtaaatacgtatttctagttttcatataaagtagttcttttataacaaatgaaaagtatttttcttgtatattattaagtaatgaatatataagaactgtactcttctcagcttgagcttaacataggtaaatatcaccaacatctgtccttagaaaggaccatctcatgttttttttcttgctatgacttgtgtattttcttgcatcctccctagacttccctatttcgctttctcctcggctcactttctccctttttatttttcaccaaaccatttgtagagctacaaaacctatcctttcttattttcagtagtcagaattttatctagaaatcttttaacacctttttagtggttatttctaaaatcactgtcaacaataaatctaaccctagttgtatccctcctttaagtatttaaaacttgttgccccaaatgtgaaagcatttaattcctttaagaggcctaactcattcaccctgacagagttcacaaaaagcccactttagagtatacattgctattatgggagaccacccagacatctgactaatggctctgtgccacactccaagacctgtgccttttagagaagctcacaatgatttaaggactgtttgaaacttccaattatgtctataatttatattcttttgtttacatgatgaaactttttgttgttgcttgtttgtatataatacaatgtgtacatgtatctttttctcgattcaaatcttaacccttaggactctggtatttttgatctggcaaccatatttctggaagttgagatgtttcagcttgaagaaccaaaacagaaggaatatgtacaaagaataaattttctgctcacgatgagtttagtgtgtaaagtttagagacatctgactttgatagctaaattaaaccaaaccctattgaagaattgaatatatgctacttcaagaaactaaattgatctcgtagaattatcttaataaaataatggctataatttctctgcaaaatcagatgtcagcataagcgatggataatacctaataaactgccctcagtaaatccatggttaataaatgtggtttctacatt

SEQ ID NO: 126 - DNA, 655 bp, Homo sapiens; identical to SEQ ID NO: 18

SEQ ID NO: 127 - DNA, 1585 bp, Homo sapiens; identical to SEQ ID NO: 19

SEQ ID NO: 128 - DNA, 923 bp, Homo sapiens; identical to SEQ ID NO: 20
  misc_feature (1)..(923): n = a, t, g, or c

SEQ ID NO: 129 - DNA, 3885 bp, Homo sapiens; identical to SEQ ID NO: 21

SEQ ID NO: 130 - DNA, 1414 bp, Homo sapiens
cgattgaggaacccatttcctcattctgcaaattgcaaacctgagggcccaaagagggacaggggcttgccaggtctcagcaggctgtgagcaagagctaaagcctaatcctcctgcctttgggctggagccttccttgtaccccagggtcagtgtctttgttggatacaggcttagattgactgactgtaccctgagaacctaggggagtccctgttcccaattcttctcctacccccaccttggcctgatggaggaagaccctgctgtgttgagatgagcaccagagccaagaagctgaggaggatctggagaattctggaggaagaggagagtgttgctggagctgtacagaccctgcttctcaggtcccaggaaggtggcgtcacatctgcagccgcgtcgacgttgtcggagcctccgcggaggacccaggagagccggactaggaccagggccctgggcctccccacactccccatggagaagctggcggcctctacagagccccaagggcctcggccggtcctgggccgtgagagtgtccaggtgcccgatgaccaagactttcgcagcttccggtcagagtgtgaggctgaggtgggctggaacctgacctatagcagggctggggtgtctgtctgggtgcaggctgtggagatggatcggacgctgcacaagatcaagtgccggatggagtgctgtgatgtgccagccgagacactctacgacgtcctacacgacattgagtaccgcaagaaatgggacagcaacgtcattgagacttttgacatcgcccgcttgacagtcaacgctgacgtgggctattactcctggaggtgtcccaagcccctgaagaaccgtgatgtcatcaccctccgctcctggctccccatgggcgctgattacatcattatgaactactcagtcaaacatcccaaatacccacctcggaaagacttggtccgagctgtgtccatccagacgggctacctcatccagagcacagggcccaagagctgcgtcatcacctacctggcccaggtggaccccaaaggctccttacccaagtgggtggtgaataaatcttctcagttcctggctcccaaggccatgaagaagatgtacaaggcgtgcctcaagtaccccgagtggaaacagaagcacctgcctcacttcaagccgtggctgcacccggagcagagcccgttgccgagcctggcgctgtcggagctgtcggtgcagcatgcggactcactggagaacatcgacgagagcgcggtggccgagagcagagaggagcggatgggcggcgcgggcggcgagggcagcgacgacgacacctcgctcacctgagcgacgcaccgcttcagggacggagacaggaccggcggagccctggggcggcggccgc

SEQ ID NO: 131 - DNA, 441 bp, Homo sapiens
ccattaaaattatattccactaaattattaaagttcaatttgatatacagttaggtcttttttctgttgatgttgacgtttaagatatctttccatccttgctgattaactttattttccatgtgcattctgtagagttccccctctgaacttccttgcactcaacttcccttcatctcactccctcctcaacccctctttctttttctgccagactgagtcctttaaacttctgagcttccttctacctctccctttctttgttcgctgtccttattgcatttccccataggagcctagttctgttctagggactagatctgtatcatggagtgagccatgcctccagctctcatttcatttggaagagatgcagggccacagccatcacagcagactggggggcactctgtaacagggaagcacaggactgctgggaga

SEQ ID NO: 132 - DNA, 3492 bp, Homo sapiens; identical to SEQ ID NO: 23

SEQ ID NO: 133 - DNA, 1771 bp, Homo sapiens; identical to SEQ ID NO: 24

SEQ ID NO: 134 - DNA, 473 bp, Homo sapiens
  misc_feature (1)..(473): n = a, t, g, or c
ttttttttttttctnctagaaattcattttattcttattcagactattttcaaaagaagcagtggtgtgctgtttttctaaaaatatgcctttatagatttttatatatgtatattataaaacccatacatgtatttacatgattgctacatacaaaattacagcactgtggtatgtacacatctacaggtacattcttgccgcgcatccctgctgtgctttccccacgtgggggagggagggagactgaatcggttgtgagcagctgngggcnggccgggccgcgganctctgagtgggggccngggtggacgaaggagggncggctgcagaggcaggagcagcagccactgcaggcttctgcagggcaggcaggcagcatctnggggcttccggcagccttcccctccccttccaccccgtggtgcctntgcttgccntcaaggttggggtnggttnaccacaganccttt

SEQ ID NO: 135 - DNA, 652 bp, Homo sapiens; identical to SEQ ID NO: 25
  misc_feature (1)..(652): n = a, t, g, or c

SEQ ID NO: 136 - DNA, 840 bp, Homo sapiens; identical to SEQ ID NO: 26

SEQ ID NO: 137 - DNA, 1546 bp, Homo sapiens; identical to SEQ ID NO: 27

SEQ ID NO: 138 - DNA, 836 bp, Homo sapiens; identical to SEQ ID NO: 28

SEQ ID NO: 139 - DNA, 635 bp, Homo sapiens; identical to SEQ ID NO: 29
  misc_feature (1)..(635): n = a, t, g, or c

SEQ ID NO: 140 - DNA, 539 bp, Homo sapiens; identical to SEQ ID NO: 30
  misc_feature (1)..(539): n = a, t, g, or c

SEQ ID NO: 141 - DNA, 707 bp, Homo sapiens; identical to SEQ ID NO: 31

SEQ ID NO: 142 - DNA, 1203 bp, Homo sapiens; identical to SEQ ID NO: 32

SEQ ID NO: 143 - DNA, 419 bp, Homo sapiens; identical to SEQ ID NO: 33

SEQ ID NO: 144 - DNA, 582 bp, Homo sapiens; identical to SEQ ID NO: 34
  misc_feature (1)..(582): n = a, t, g, or c

SEQ ID NO: 145 - DNA, 640 bp, Homo sapiens; identical to SEQ ID NO: 35
  misc_feature (1)..(640): n = a, t, g, or c

SEQ ID NO: 146 - DNA, 944 bp, Homo sapiens; identical to SEQ ID NO: 36
  misc_feature (1)..(944): n = a, t, g, or c

SEQ ID NO: 147 - DNA, 580 bp, Homo sapiens; identical to SEQ ID NO: 37

SEQ ID NO: 148 - DNA, 344 bp, Homo sapiens; identical to SEQ ID NO: 38
  misc_feature (1)..(344): n = a, t, g, or c

SEQ ID NO: 149 - DNA, 517 bp, Homo sapiens
gctgttgttactttggaacttcttgcatgagaatatttgcgtatatgaatctccagtaccaagcatacaccaaaaatgtgtacatttcagatgaaggacataacagagccctaataaaatacagaattgagcttaatttaactgtcttgggcaaccatcatgcctggctaatatgccatattatttccgttgtacacagtacatgttttggtttactaaacattgatcaaaattgatcgaaatctctaagttttggttaccatgtacagagaacaattgctcagcatggcatttaaataaaacagtaatattttaaaaattcacaaatacaatgcacaatttattttaaaaaaataaaatttaaaaaccttgaggatggatgaggctttgggtaattaacctgaaaaacaaaactaacaaaaaactacaagaacagtatgttaccagatttatactttaaaacactattaaaagaggaactcactgacactgctagaaatatttctaaaattcagct

SEQ ID NO: 150 - DNA, 655 bp, Homo sapiens
aatcttttttttttttttttttcttctgctttggggttggtgagcgagaactgctagactcccgaacaaggctgtaaggtttgggaggctcaggagctggttgtttagcttctcgggcacgacgctgaggatcaaaagagctgccatctacgtaagaatcactgatgccaaaggcagcacggagtctttcattcttcttctcatttaattctgccaactggtgagtctccgtgaccgctggcctctgccctggggtctcctccttgcccccagggttcacatccttctccagcaacatgagtcgaaaggtcgccactttttcctgaatttgctgttcctcgtacccctgctcttccatcatctcctccagctcgaggcatcgcagctcgacgcgccgcttgcgctcgtggtccaggatgtcaggattaggccgcttcaccagggcagcctccaggcgccgcagttccttgggtgctgctctaggcttatctttcacttcaggggaggaaccagacctactgcgccgaggggatagtcgagatttgctgtcaacctctggagatgatccagaccgatctctctgccgaagtggggttcgtgtcttggctttagaatctggagacgagtctgactcacttctttcctgacgggatgc

SEQ ID NO: 151 - DNA, 449 bp, Homo sapiens
acttttttgcccttattgttcttgctttgtcccaagtagatgcaaatgttgtgcaaaccaacttgatcttaagatgttgttgagaacactggagtcacgtgtccatgggtccttcaggctggcttttgatgggagctgggatgcagatgatttacggagggttataatctgtgatgctggtctgaagtctgaatattccaagttgctgactgcaggcagagcctcatgtcctcctggcgctcctgttgccgctgcttgcgctggccctcgggtcgaccctggcccgaagcagcccgcaggcggcgctccctgcaccggagccggccttcctgccttggggcccgatcgcttttcttctgagaattggagtagaacatgatgaaaagcataatcatttggataaagggcagcagggggcagaagaagatgccaatcctgtgagggagaga

SEQ ID NO: 152 - DNA, 773 bp, Homo sapiens; identical to SEQ ID NO: 39

SEQ ID NO: 153 - DNA, 447 bp, Homo sapiens; identical to SEQ ID NO: 40

SEQ ID NO: 154 - DNA, 482 bp, Homo sapiens; identical to SEQ ID NO: 42

SEQ ID NO: 155 - DNA, 462 bp, Homo sapiens; identical to SEQ ID NO: 43

SEQ ID NO: 156 - DNA, 1982 bp, Homo sapiens; identical to SEQ ID NO: 44

SEQ ID NO: 157 - DNA, 599 bp, Homo sapiens; identical to SEQ ID NO: 45

SEQ ID NO: 158 - DNA, 916 bp, Homo sapiens
  misc_feature (1)..(916): n = a, t, g, or c
ttttgcaatgtttagaacattttattaaagtacaaaattgttggaatttagctaatagaaaaacatagtaaatatttacaaaaacgttgataacattactcaagtcacacacatataacaatgtagacaggtcttaacaaagtttacaaattgaaattatggagatttcccaaaatgaatctaatagctcattgctgagcatggttatcaatataacatttaagatcttggatcaaatgttgtccccgagtcttctgcaatccagtcctcttagaaattggtttctctctttgggagattcagactcagaggcagccagaggggacaggtcaagagctgaaataatcacataactactctaattttcttcattctattgactgtgtcaagttatagacacagccaaagtgtttttcttcggcctctgatgatttgagaagatgaagaacatgagcantttctcattgcttaaagaaaaacttggcacataagaggctgagtgtagtagagtatctgtactagaaccataaagttctatctgatggtaaattatgtataaaactaagataaaacagataattatgctctatctcatatctactgaaagtagaaaagggaggaagagtgacacttttaaaatcanaactgctctagtttttagcttagtggatgggtaataaacacactgcctttacgctgagtgatcagatagctatttctacagttcagaagaacttaaaaatcaggtttttaggacaaaaggaagcngacttcaaacacagacaaaggagagagaaaacaatgcccatgggatggcacttttttgacagaatataaaaaagctaagacaccttgggctttcttttctttgttgtgtgtgcctaaaacaccttccccaactaaattcaagggggga

SEQ ID NO: 159 - DNA, 1421 bp, Homo sapiens; identical to SEQ ID NO: 47

SEQ ID NO: 160 - DNA, 773 bp, Homo sapiens
  misc_feature (1)..(773): n = a, t, g, or c
gaattcngcacgaggcggtggtcggctgttgggtgtggagtttcccagcgcccctcgggtccgaccctttgagcgttctgctccggcgccagctaacctcgctcctcggcgccatgaccacaaccaccaccttcaagggagtcgaccccaacagcaggaatagctcccgagttttgcggcctccaggtggtggatccaatttttcattaggttttgatgaaccaacagaacaacctgtgaggaagaacaaaatggcctctaatatctttgggacacctgaagaaaatcaagcttcttgggccaagtcagcaggtgccaagtctagtggtggcagggaagacttggagtcatctggactgcagagaaggaactcctctgaagcaagctccggagacttcttagatctgaagggagaaggtgatattcatgaaaatgtggacacagacttgccaggcagcctggggcagagtgaaganaagcccgtgcctgcttgcgcctgtncccagcccggtggcccgggcccagtgcatccagaagnaatccccctggnggaagtccagcctcgttngggtnactctgactgnctgaacgtgncggtnnggctngttcnccaatgnttgtgnantggnaaaanttgggnctngcntganaanctcttgggnttttgttcaattaaaaaaagnaggcncntttttgtaaaaaaaanaanagannnaanaanaagngggggggncncagggtcccaaattccccnaangngggncngnaattta

SEQ ID NO: 161 - DNA, 995 bp, Homo sapiens; identical to SEQ ID NO: 48

SEQ ID NO: 162 - DNA, 2295 bp, Homo sapiens; identical to SEQ ID NO: 49

SEQ ID NO: 163 - DNA, 1976 bp, Homo sapiens; identical to SEQ ID NO: 50

SEQ ID NO: 164 - DNA, 704 bp, Homo sapiens; identical to SEQ ID NO: 51

SEQ ID NO: 165 - DNA, 535 bp, Homo sapiens
  misc_feature (1)..(535): n = a, t, g, or c
gatcgccttagctttcaaaactantttgttttatcatttaagaatacttgaggaacttctttgatcagaattatatttcagagaattgttaaagcatttctgatttaaagaaaaaaccatctaattattgaagcatttctgtatttcacatgggggtaacagagacaattatgttatagcgagttacaagttgcaatttacatcntcctataacacatgacttgattggtctaagttgccagaggtatcgggtaactggtcattgttttgttttgtttgttttattcttccttttttttggagtcacactacatgtatagtattgctcacgttagcagttttctgtaaggagggccaagtggtcagggataataggtggacttttttactccacctattttaccacaactccaccctggcagggtgacgggtccaatgccttgcctgnctcccatctttaattccaccggttaatggttaatttatggccaactccagggggggnaaaaccataacaagnccctaggtttgggng

SEQ ID NO: 166 - DNA, 2150 bp, Homo sapiens; identical to SEQ ID NO: 52

SEQ ID NO: 167 - DNA, 463 bp, Homo sapiens; identical to SEQ ID NO: 53

SEQ ID NO: 168 - DNA, 521 bp, Homo sapiens; identical to SEQ ID NO: 54

SEQ ID NO: 169 - DNA, 1388 bp, Homo sapiens; identical to SEQ ID NO: 55

SEQ ID NO: 170 - DNA, 538 bp, Homo sapiens; identical to SEQ ID NO: 56
  misc_feature (1)..(538): n = a, t, g, or c

SEQ ID NO: 171 - DNA, 571 bp, Homo sapiens
  misc_feature (1)..(571): n = a, t, g, or c
caagggtaactaactccaaaattctttctttagtaaaattgtcacatttgatgtcaatggaatacacaaactcaagtgtgctacaaacaagatgtacagagcatcacagctctgggcagtgcagctgagtgcacctgcctctcatctccacgctgaagtggcaagttcaagcttttgtttagcccagggctgcctggaacactagtgcccagcaccattcctgccacctctgcccccagagcccgcacagggtgggttgaaggctgggtgggtgaacctgggagagcgctggcagctctacaaaattcttcctcctgcccgtagctccctccctccacccacttccagagctgcagggtccctaaaagtttcttaagaaacggggctggggcctggactgggctggttaccaggggctgccctgcaagccatccatcagaggagggagggaaganctgggagactttcaggggcctaacccaccacatctgaanccctgggaggagggaggagattcagggagggncggggcaaccccggagactctggctggcattggtcaccaagggct

SEQ ID NO: 172 - DNA, 522 bp, Homo sapiens; identical to SEQ ID NO: 58

SEQ ID NO: 173 - DNA, 783 bp, Homo sapiens; identical to SEQ ID NO: 59

SEQ ID NO: 174 - DNA, 2813 bp, Homo sapiens; identical to SEQ ID NO: 60

SEQ ID NO: 175 - DNA, 2183 bp, Homo sapiens
cggacgaggacggcggggacaaggggcggctggtcggagtggcggagcgtcaagtcccctgtcggttcctccgtccctgagtgtccttggcgctgccttgtgcccgcccagcgcctttgcatccgctcctgggcaccgaggcgccctgtaggatactgcttgttacttattacagctagaggcatcatggaccgatctaaagaaaactgcatttcaggacctgttaaggctacagctccagttggaggtccaaaacgtgttctcgtgactcagcaaattccttgtcagaatccattacctgtaaatagtggccaggctcagcgggtcttgtgtccttcaaattcttcccagcgcgttcctttgcaagcacaaaagcttgtctccagtcacaagccggttcagaatcagaagcagaagcaattgcaggcaaccagtgtacctcatcctgtctccaggccactgaataacacccaaaagagcaagcagcccctgccatcggcacctgaaaataatcctgaggaggaactggcatcaaaacagaaaaatgaagaatcaaaaaagaggcagtgggctttggaagactttgaaattggtcgccctctgggtaaaggaaagtttggtaatgtttatttggcaagagaaaagcaaagcaagtttattctggctcttaaagtgttatttaaagctcagctggagaaagccggagtggagcatcagctcagaagagaagtagaaatacagtcccaccttcggcatcctaatattcttagactgtatggttatttccatgatgctaccagagtctacctaattctggaatatgcaccacttggaacagtttatagagaacttcagaaactttcaaagtttgatgagcagagaactgctacttatataacagaattggcaaatgccctgtcttactgtcattcgaagagagttattcatagagacattaagccagagaacttacttcttggatcagctggagagcttaaaattgcagattttgggtggtcagtacatgctccatcttccaggaggaccactctctgtggcaccctggactacctgccccctgaaatgattgaaggtcggatgcatgatgagaaggtggatctctggagccttggagttctttgctatgaatttttagttgggaagcctccttttgaggcaaacacataccaagagacctacaaaagaatatcacgggttgaattcacattccctgactttgtaacagagggagccagggacctcatttcaagactgttgaagcataatcccagccagaggccaatgctcagagaagtacttgaacacccctggatcacagcaaattcatcaaaaccatcaaattgccaaaacaaagaatcagctagcaaacagtcttaggaatcgtgcagggggagaaatccttgagccagggctgccatataacctgacaggaacatgctactgaagtttattttaccattgactgctgccctcaatctagaacgctacacaagaaatatttgttttactcagcaggtgtgccttaacctccctattcagaaagctccacatcaataaacatgacactctgaagtgaaagtagccacgagaattgtgctacttatactggttcataatctggaggcaaggttcgactgcagccgccccgtcagcctgtgctaggcatggtgtcttcacaggaggcaaatccagagcctggctgtggggaaagtgaccactctgccctgaccccgatcagttaaggagctgtgcaataaccttcctagtacctgagtgagtgtgtaacttattgggttggcgaagcctggtaaagctgttggaatgagtatgtgattctttttaagtatgaaaataaagatatatgtacagacttgtattttttctctggtggcattcctttaggaatgctgtgtgtctgtccggcaccccggtaggcctgattgggtttctagtcctccttaaccacttatctcccatatgagagtgtgaaaaataggaacacgtgctctacctccatttagggatttgcttgggatacagaagaggccatgtgtctcagagctgttaagggcttatttttttaaaacattggagtcatagcatgtgtgtaaactttaaatatgcaaataaataagtatctatgtctaaaaaaaaaaaaaaaa

SEQ ID NO: 176 - DNA, 452 bp, Homo sapiens; identical to SEQ ID NO: 62

SEQ ID NO: 177 - DNA, 3171 bp, Homo sapiens
gaattcgcggccgcgtcgaccagatctgaggcgaggctaggtgagccgtgggaagaaaagagggagcagctagggcgcgggtctccctcctcccggagtttggaacggctgaagttcaccttccagcccctagcgccgttcgcgccgctaggcctggcttctgaggcggttgcggtgctcggtcgccgcctaggcggggcagggtgcgagcaggggcttcgggccacgcttctcttggcgacaggattttgctgtgaagtccgtccgggaaacggaggaaaaaaagagttgcgggaggctgtcggctaataacggttcttgatacatatttgccagacttcaagatttcagaaaaggggtgaaagagaagattgcaactttgagtcagacctgtaggcctgatagactgattaaaccacagaaggtgacctgctgagaaaagtggtacaaatactgggaaaaacctgctcttctgcgttaagtgggagacaatgtcacaagttaaaagctcttattcctatgatgccccctcggatttcatcaatttttcatccttggatgatgaaggagatactcaaaacatagattcatggtttgaggagaaggccaatttggagaataagttactggggaagaatggaactggagggctttttcagggcaaaactcctttgagaaaggctaatcttcagcaagctattgtcacacctttgaaaccagttgacaacacttactacaaagaggcagaaaaagaaaatcttgtggaacaatccattccgtcaaatgcttgttcttccctggaagttgaggcagccatatcaagaaaaactccagcccagcctcagagaagatctcttaggctttctgctcagaaggatttggaacagaaagaaaagcatcatgtaaaaatgaaagccaagagatgtgccactcctgtaatcatcgatgaaattctaccctctaagaaaatgaaagtttctaacaacaaaaagaagccagaggaagaaggcagtgctcatcaagatactgctgaaaagaatgcatcttccccagagaaagccaagggtagacatactgtgccttgtatgccacctgcaaagcagaagtttctaaaaagtactgaggagcaagagctggagaagagtatgaaaatgcagcaagaggtggtggagatgcggaaaaagaatgaagaattcaagaaacttgctctggctggaatagggcaacctgtgaagaaatcagtgagccaggtcaccaaatcagttgacttccacttccgcacagatgagcgaatcaaacaacatcctaagaaccaggaggaatataaggaagtgaactttacatctgaactacgaaagcatccttcatctcctgcccgagtgactaagggatgtaccattgttaagcctttcaacctgtcccaaggaaagaaaagaacatttgatgaaacagtttctacatatgtgccccttgcacagcaagttgaagacttccataaacgaacccctaacagatatcatttgaggagcaagaaggatgatattaacctgttaccctccaaatcttctgtgaccaagatttgcagagacccacagactcctgtactgcaaaccaaacaccgtgcacgggctgtgacctgcaaaagtacagcagagctggaggctgaggagctcgagaaattgcaacaatacaaattcaaagcacgtgaacttgatcccagaatacttgaaggtgggcccatcttgcccaagaaaccacctgtgaaaccacccaccgagcctattggctttgatttggaaattgagaaaagaatccaggagcgagaatcaaagaagaaaacagaggatgaacactttgaatttcattccagaccttgccctactaagattttggaagatgttgtgggtgttcctgaaaagaaggtacttccaatcaccgtccccaagtcaccagcctttgcattgaagaacagaattcgaatgcccaccaaagaagatgaggaagaggacgaaccggtagtgataaaagctcaacctgtgccacattatggggtgccttttaagccccaaatcccagaggcaagaactgtggaaatatgccctttctcctttgattctcgagacaaagaacgtcagttacagaaggagaagaaaataaaagaactgcagaaaggggaggtgcccaagttcaaggcacttcccttgcctcattttgacaccattaacctgccagagaagaaggtaaagaatgtgacccagattgaacctttctgcttggagactgacagaagaggtgctctgaaggcacagacttggaagcaccagctggaagaagaactgagacagcagaaagaagcagcttgtttcaaggctcgtccaaacaccgtcatctctcaggagccctttgttcccaagaaagagaagaaatcagttgctgagggcctttctggttctctagttcaggaaccttttcagctggctactgagaagagagccaaagagcggcaggagctggagaagagaatggctgaggtagaagcccagaaagcccagcagttggaggaggccagactacaggaggaagagcagaaaaaagaggagctggccaggctacggagagaactggtgcataaggcaaatccaatacgcaagtaccagggtctggagataaagtcaagtgaccagcctctgactgtgcctgtatctcccaaattctccactcgattccactgctaaactcagctgtgagctgcggataccgcccggcaatgggacctgctcttaacctcaaacctaggaccgtcttgctttgtcattgggcatggagagaacccatttctccagacttttacctacccgtgcctgagaaagcatacttgacaactgtggactccagttttgttgagaattgttttcttacattactaaggctaataatgagatgtaactcatgaatgtctcgattagactccatgtagttacttcctttaaaccatcagccggccttttatatgggtcttcactctgactagaatttagtctctgtgtcagcacagtgtaatctctattgctattgccccttacgactctcaccctctccccactttttttaaaaattttaaccagaaaataaagatagttaaatcctggaaaaaaaaaaaaaaaaaaaaaa

SEQ ID NO: 178 - DNA, 481 bp, Homo sapiens; identical to SEQ ID NO: 63

SEQ ID NO: 179 - DNA, 1755 bp, Homo sapiens; identical to SEQ ID NO: 64

SEQ ID NO: 180 - DNA, 3248 bp, Homo sapiens; identical to SEQ ID NO: 65

SEQ ID NO: 181 - DNA, 530 bp, Homo sapiens; identical to SEQ ID NO: 66

SEQ ID NO: 182 - DNA, 508 bp, Homo sapiens; identical to SEQ ID NO: 67
  misc_feature (1)..(508): n = a, t, g, or c

SEQ ID NO: 183 - DNA, 766 bp, Homo sapiens
  misc_feature (1)..(766): n = a, t, g, or c
tttttggtatgcattttttttttattttttcaactttttgcaaagcagcatagcaacaatcgtgattgtagcacttgcctgaggttgtggtcacaaccaacgtagtaaacatcatttgcatatcagtaagaaaaagaaaacaggaggagatgagttcttacaaaacaaagcagattctaagatttcactgtgtctgcattgctccttccacgcaagttctcccttagctgaccgcaatcttgttttcttccaggaagtgaggaaactggtgtttgggaacgccgtcagtagcacttggtttttccacatctgcactgatacccgactgggagccatccatcttggagacagtggcgttattcacaacggaggtggcccccaaggaaaccgggagggtaggaacccccccactctggatcacagagatctcattggtcttcacggccagaccgccattgagcatgctggtgtactggttccacacaacagggtccacattcactgaaggggccaggatttccttgggaaagatttctgagactctttctccgtccgtacctaacagagccatggtgttctacgtggccaactttcttacaccgcagggctgagttatttgttcgccccgtgtgtcatgtagtgaaacctttaagttgcctctggtggntagagctcgcccactaatggtcgacacctaaggcttctcttcagtgtgagtcccgttcgtgatctgaagagcgcttagcgacgagaagttctttccaca

SEQ ID NO: 184 - DNA, 414 bp, Homo sapiens
ttttttttttttttttttaaagagaaaaagaactctatgtcctcatttcaaatgcagggagagtctctcggtttaaaccgtaagtgcccttcccaactcggcagacccgccccagtgaagagcattttcatgacttgggaacaggacactcaccttgccactaggcaggactgtactcactggctcggggggcgcccaggcaggagacaaagcattttcccatggcatatggatggcttccgtgtgctgcatgactgggcagtgtgagaaaaacgcaacccccagtgactgctgtagaggacaattcagccaaaaatcaaactgccaccgtcatctgctgagaccttgatttcccagggcctggtggtgctgaaatactcagaacatcctgaatgaatgaatgtccacttcctt

SEQ ID NO: 185 - DNA, 462 bp, Homo sapiens
  misc_feature (1)..(462): n = a, t, g, or c
ttgatttttaatctttttttagccacagaccttttgttcaaaggaaaccttaaatggagatgtaacacgccagctgcttaaagacacaggctctgcaagagtgagtgtgggagtgggagggggctacagtctcgccagctgggccccctcgctgcttctgcccagctctccctgctgcagcactggcactgcagggaaccttcccagccacggggggctgagcctgggcctgtcaagccctgactggacattctccacagagaatgtttatggagtcagcacgaagccatgagaaggggcagcccangggccaaccaccctcacaggtcctccagggaggggccctcagagcttctcagcagggacagcaggttcagagctgagacaccgggcacgtggccagcacagatctgcagcacgcgcaccangcgctgcgccatggtggccctaaagccttccacc

SEQ ID NO: 186 - DNA, 1068 bp, Homo sapiens; identical to SEQ ID NO: 69

SEQ ID NO: 187 - DNA, 1674 bp, Homo sapiens; identical to SEQ ID NO: 70

SEQ ID NO: 188 - DNA, 867 bp, Homo sapiens
  misc_feature (1)..(867): n = a, t, g, or c
gaattcggcacgaggcaacatctatgccaaatactgtgcattctacaatggtgctaatctcagacctaaatgatactccatttaatttaaaaaagagttttaaataattatctatgtgcctgtatttcccttttgagtgctgcacaacatgttaacatattagtgtaaaagcagatgaaacaaccacgtgttctaaagtctagggattgtgctataatccctatttagttcaaaattaaccagaattcttccatgtgaaatggaccaaactcatattattgttatgtaaatacagagttttaatgcagtatgacatcccacaggggaaaagaatgtctgtagtgggtgactgttatcaaatattttatagnatacaatgaacggtgaacagactggtaacttgtttgagttccccatgacagntttggagaccttgtcaatagcaaatccatttttggtatttaaaattttttggacctggatttggaaaaaccnccnttaaaantatcttttaaaaaggtaaaanactaanannaaaaaaaaaaaccccgnagggggggggcccngggtanccccaanttccgccctnaanaggtggaggcccggtntttacnaattccactgggccggcccggttttaacaaaccggccggnnccctggggnanaccccngggnggtaccccaacttnnacccgccttnnnnggaaatnccccctttncgccaagctgggggaaananngganaggcccgccccgntcngccntcccaaaagttnncgcccctnanngggnatggnnaattntaccgngtaaattttggaaaaatcccgggaaattttggaaaccagnccnntttnanccaaggg

SEQ ID NO: 189 - DNA, 2235 bp, Homo sapiens; identical to SEQ ID NO: 72

SEQ ID NO: 190 - DNA, 564 bp, Homo sapiens; identical to SEQ ID NO: 73

SEQ ID NO: 191 - DNA, 3866 bp, Homo sapiens; identical to SEQ ID NO: 74

SEQ ID NO: 192 - DNA, 618 bp, Homo sapiens; identical to SEQ ID NO: 76
  misc_feature (1)..(618): n = a, t, g, or c

SEQ ID NO: 193 - DNA, 587 bp, Homo sapiens
tttggcaagtaatttctaagcactaaaaagatacacagaaggaaaatcacaggctcttctccttccctcaaaaccacctgagaattaaaagcattaaggactttatacagctgtgtaacaactctgagcaggtaagttttactccagaaaaagaataatctataactactttggaggactttatcttgcccaccacccttccaaagcagggaatctttgctttggtgaggctgcttcagtggcagactgcaaggctatgtcctgacttacaggaggctcagtgaggagctcccagggctcttcttatatacctcagagagagagctctgaatgtcgcccagctactgggcagttcttgtatcaaaccccactgagcaatcttcttgaaatacttcactacttcctactcatttgataaaatggcaacaataaattatgcaaaactaagataaaagagattaccaattttgaccaaaactcacataaaattgcccagtagactcatgtgagaagctcatgggacaaacaaatttcagctagatatttaagtaccatatttgtaactatattctgagtaacacttagca

SEQ ID NO: 194 - DNA, 221 bp, Homo sapiens; identical to SEQ ID NO: 77

SEQ ID NO: 195 - DNA, 4217 bp, Homo sapiens
cttcccggccccagccaaggctgtcgtttacgtgtcggacattcaggagctgtacatccgtgtggttgacaaggtggagattgggaagacagtgaaggcatacgtccgcgtgctggacttgcacaagaagcccttccttgccaaatacttcccctttatggacctgaagctccgagcagcctccccgatcattacattggtggcccttgatgaagcccttgacaactacaccatcacattcctcatccgcggtgtggccatcggccagaccagtctaactgcaagtgtgaccaataaagctggacagagaatcaactcagccccacaacagattgaagtctttcccccgttcaggctgatgcccaggaaggtgacactgcttatcggggccacgatgcaggtcacctccgagggcggcccccagcctcagtccaacatccttttctccatcagcaatgagagcgttgcgctggtgagcgctgctgggctggtacagggcctcgccatcgggaacggcactgtgtctgggctcgtgcaggcagtggatgcagagaccggcaaggtggtcatcatctctcaggacctcgtgcaggtggaggtgctgctgctaagggccgtgaggatccgcgcccccatcatgcggatgaggacgggcacccagatgcccatctatgtcaccggcatcaccaaccaccagaaccctttctcctttggcaatgccgtgccaggcctgaccttccactggtctgtcaccaagcgggacgtcctggacctccgagggcggcaccacgaggcgtcgatccgactcccgtcacagtacaactttgccatgaacgtgctcggccgggtaaaaggccggaccgggctgagggtggtggtcaaggctgtggaccccacatcggggcagctgtatggcctggccagagaactctcggatgagatccaagtccaggtgtttgagaagctgcagctgctcaaccctgaaatagaagcagaacaaatattaatgtcgcccaactcatatataaagctgcagacaaacagggatggtgcagcctctctgagctaccgcgtcctggatggacccgaaaaggttccagttgtgcatgttgatgagaaaggctttctagcatcagggtctatgatcgggacatccaccatcgaagtgattgcacaagagccctttggggccaaccaaaccatcattgttgctgtaaaggtatcccctgtttcctacctgagggtttccatgagccctgtcctgcacacccagaacaaggaggccctggtggccgtgcctttgggaatgaccgtgaccttcactgtccacttccacgacaactctggagatgtcttccatgctcacagttcggtcctcaactttgccactaacagagacgactttgtgcagatcgggaagggccccaccaacaacacctgcgttgtccgcacagtcagcgtgggcctgacactgctccgtgtgtgggacgcagagcacccgggcctctcggacttcatgcccctgcctgtcctacaggccatctccccagagctgtctggggccatggtggtgggggacgtgctctgtctggccactgttctgaccagcctggaaggcctctcaggaacctggagctcctcagccaacagcatcctccacatcgaccccaagacgggtgtggctgtggcccgggccgtgggatccgtgacggtttactatgaggtcgctgggcacctgaggacctacaaggaggtggtggtcagcgtccctcagaggatcatggcccgtcacctccaccccatccagacaagcttccaggaggctacagcctccaaagtgattgttgccgtgggagacagaagctctaacctgagaggcgagtgcacccccacccagagggaagtcatccaggccttgcacccagagaccctcatcagctgccagtcccagttcaagccggccgtctttgatttcccatctcaagatgtgttcaccgtggagccacagtttgacactgctctcggccagtacttctgctcaatcacaatgcacaggctgacggacaagcagcggaagcacctgagcatgaagaagacagctctggtggtcagtgcctccctctccagcagccacttctccacagagcaggtgggggccgaggtgcccttcagcccaggtctcttcgccgaccaggctgaaatccttttgagcaaccactacaccagttccgagatcagggtctttggtgccccggaggttctggagaacttggaggtgaaatccgggtccccggccgtgctggcattcgcaaaggagaagtcttttgggtggcccagcttcatcacatacacggtcggcgtctcggaccccgcggctggcagccaagggcctctgtccactaccctgaccttctccagccccgtgaccaaccaagccattgccatcccagtgacagtggcttttgtgatggatcgccgtgggcccggtccttatggagccagcctcttccagcacttcctggattcctaccaggtcatgttcttcacgctcttcgccctgttggctgggacagcggtcatgatcatagcctaccacactgtctgcacgccccgggatcttgctgtgcctgcagccctcacgcctcgagccagccctggacacagcccccactatttcgctgcctcatcacccacatctcccaatgcattgcctcctgctcgcaaagccagccctccctcagggctgtggagcccagcctatgcctcccactaggccgcgtgaaggttcccggaggatgggtctcagccgagcctcgtgcacccccaagatggaacatccctgctgcattcacactggaacaagcccctccagatgagtgccccggccccaggccagcttcactgccgtctcttcacacagagctgtagtttcggctctgcccattagctcattttatgtaggagttttaaatgtgtgtttttttcctttcaagtcttacaaagctaagactttttggctcattcctttttgcatggttgtctagggtttctggacaatgtgctgttgcatttttattttcctagccttgctaaaatctttcccttctcaagactttgagcagttagaagtgctctttagaagttgtctgtgggtgatgttactgtagtggtctcagggaaaggattgtccagttactttagggggtttttggtggggtttttccccctgtgaaaacttactttgcccctagtctggctgctgctaggacttctgaggagcaatgggacatgagtgtccctgtatctgcgccactgccgcaagggaagcctcaggaaccagcacctggaggccaggatagccaagccctgggtgagcgagaggctggagaacacaggagctcacccagggctgctgcccaaccatgggccactgtgaacagacttcagtcctctgtttttgtttcataagccgttgagacatctgatggacttggcttaggccctgctgggacatcccacgtgtgatccctttcactccatcaggacaccaggactgtccttaggaaaatgtccttgagatggcagcaggagtcatattttctgtgtgtgtgtttcggaaagccgctgtgtcctgcctcagcacaaagacccagtgtcatttgctcctcctgttcctgtgccactccagaacctcagcagatctgagccaccgcctgccagtgtgagaggcggccactttcatggcagcttatcaggcgcagggccccagacagcttcccagccggccctagagcccggcctgggccaatgatggagggcggccaccagcccagggcctgcccatccagaagggactccccagggcctgggggaggagacccttggaaaagtcctctcttcccagctcctgattctggatctgagattctcagatcacaggcccctgtgctccaggccgaggctgggccaccctcagggagatccagagactcatgcccatggccatccatgcgtggacgctgtgtggagagtccaggatgacgggatcccgcacaagctcccttcagtccttcagggctgggccatgtggttgatttttctaaagctggagaaaggaagaattgtgccttgcatattacttgagcttaaactgacaacctggatgtaaataggagcctttctactggtttatttaataaagttctatgtgatttttt

SEQ ID NO: 196 - DNA, 480 bp, Homo sapiens; identical to SEQ ID NO: 78

SEQ ID NO: 197 - DNA, 395 bp, Homo sapiens
aatttttgaataattaacgattttacaaggaaaagggaaaagagaattccaagaagtcagttaacctagcagagcacagcaggacatagggcctaacggaacgtttgtttatcactctgaacttcaataaaaatgagtcattttaaaattttaaaaaagtatttaaggccgggcatggtggctcacccctgtaatccccagcactttgggaggccaaggcgggcagatcacctgaggttaggagttcgagaacagcctaaccaacatagagaaatcccgtctctactaaaaatacaaaattagccaggcatggtggcaggcacatgtaatcccagctactcaggaggctgaggcaggagaatcgcttgaaccaggaggtgaaggttgcagtgagc

SEQ ID NO: 198 - DNA, 762 bp, Homo sapiens; identical to SEQ ID NO: 79
  misc_feature (1)..(762): n = a, t, g, or c

SEQ ID NO: 199 - DNA, 479 bp, Homo sapiens
  misc_feature (1)..(479): n = a, t, g, or c
gtatttgagtattgttttattanccaaaacacaaaaccaaaatgaaaactggcttagaatataaaattctcatttttcaaagtgaaagtttgaagatactagctaaagttgataacttaaatagtggtaaaagtaaataacttagaattatggcagcaatcacaagaagaaacagaaaacagggggactagggattcggtggtagacttttactttaaaatagagctatgcagcagattctccatgacttggcttacatgcagtatgtcctatggnagtaaaattttcaaatacctccatcaccttcagtaactcatattaataaaagtaaaaggccaggtatataaaaccaggaaccccagtatataaaccatattacctccaatttggatcccccaggtaaacccaaaggagttttttaaaaaattatnccccaccataccctttttaaggacaactttttccggctacccnacaaa

SEQ ID NO: 200 - DNA, 2066 bp, Homo sapiens; identical to SEQ ID NO: 81

SEQ ID NO: 201 - DNA, 460 bp, Homo sapiens; identical to SEQ ID NO: 82

SEQ ID NO: 202 - DNA, 1779 bp, Homo sapiens; identical to SEQ ID NO: 83

SEQ ID NO: 203 - DNA, 2828 bp, Homo sapiens; identical to SEQ ID NO: 84

SEQ ID NO: 204 - DNA, 1633 bp, Homo sapiens; identical to SEQ ID NO: 85

SEQ ID NO: 205 - DNA, 572 bp, Homo sapiens
  misc_feature (1)..(572): n = a, t, g, or c
tgaaactcagtggctctatctaaccttactatctcctcactctttctctaagactaaactctaggctcttaaaaatctgcccacaccaatcttagaagctctgaaaagaatttgtctttaaatattttttaatagtaacatgtattttatggaccaaattgacattttcgactattttttccaaaaaagtcaggtgaatttcagcacactgagttgggaatttcttatcccagaagaccaaccaatttcatatttatttaagattgattccatactccgttttcaaggagaatccctgcagtctccttaaaggtagaacaaatactttctatttttttttcaccattgtgggattggactttaagaggtgactctaaaaaaacagagaacaaatatgtctcagttgtattaagcacggacccatattatcatattcacttaaaaaaatgatttcctgtgcaccttttggcactctcttttcaatgtgggaaaacttagtcaccctgaaacccacaaataaataaacttgtgatgtgggcagaggttggggtggcatgntgtgttaattaacc

SEQ ID NO: 206 - DNA, 483 bp, Homo sapiens; identical to SEQ ID NO: 87

SEQ ID NO: 207 - DNA, 2600 bp, Homo sapiens; identical to SEQ ID NO: 88

SEQ ID NO: 208 - DNA, 598 bp, Homo sapiens; identical to SEQ ID NO: 89
  misc_feature (1)..(598): n = a, t, g, or c

SEQ ID NO: 209 - DNA, 448 bp, Homo sapiens
tttttttttttttttttttttttttctttgggaaaaccaaacatgctttatttcatttttttcacaatttatttaaacatctcacatatccaaaataggtccaatttaatttttctgcttgcccaagaaacaaagcttctgtggaaccatggaagaagatgaaaatgagactggcaaagaacaaatgctgaatctgaagaagatttgggcaaataatctgcatacttttaattgggaataagatggaaaatatgaatgctaaatcaaattttttaaaaaatcccccacacgatacaactcaatacaggagtattttttctcaaattcttctagcaccatcaacattcttcaagtatctgaaatactattaattagcacctttgtattatgaacaaaacaaaacaaggaccctcagttcattttctgtttaggccagcacctaccaatg

SEQ ID NO: 210 - DNA, 607 bp, Homo sapiens
tgaattcgtgggtggcggcggcggcggacccttggggtctggacgcgacggcggcgggacgatgaacgcccctccagccttcgagtcgttcttgctcttcgagggcgagaagaagatcaccattaacaaggacaccaaggtacccaatgcctgtttattcaccatcaacaaagaagaccacacactgggaaacatcattaaatcacaactcctaaaagacccgcaagtgctatttgctggctacaaagtcccccaccccttggagcacaagatcatcatccgagtgcagaccacgccggactacagcccccaggaagcctttaccaacgccatcaccgacctcatcagtgagctgtccctgctggaggagcgctttcgggtggccataaaagacaagcaggaaggaattgagtaggggccagagggggctctgctcggcctgtgagccccgttcctacctgtgcctgaccctccgctccaggtaccacaccgaggagagcggccggtcccagccatggcccgccttgtggccacccctcaccctgacaccgacgtgtcctgtacatagattaggttttatattcctaataaagtatagcggaagaga

SEQ ID NO: 211 - DNA, 493 bp, Homo sapiens
ttttttttacagtgcaagggttttaatagtccacactaaaataggctgtacagttttgtagtttaacattaaaagcaatcctgccttattttaaaatgcttctacttaagaatgcttcttcctcccccactccttcacttaaggtataagtctacccctaaagtgcatttctcaggcattaaaaacagcactgtgatttgctttccacagagtcctaaataacagccaccttcttcatttgagaggctacagagttcaagctgagctgtgacaggagccagggggccagggccccagaatagctttttgaaaaaaaataattatgccaccctcctccgcggcaggtatcttctcttaccacaaataaatatttaatgcatccttggagtcatgaaatattgagaacccaattgacacttcaatttccagaaaaataaaatcatgaaggcattgtgtaaatattctgaatttggtggaatgagacaacgcgtaa

SEQ ID NO: 212 - DNA, 578 bp, Homo sapiens; identical to SEQ ID NO: 90

SEQ ID NO: 213 - DNA, 828 bp, Homo sapiens; identical to SEQ ID NO: 91
  misc_feature (1)..(828): n = a, t, g, or c

SEQ ID NO: 214 - DNA, 652 bp, Homo sapiens; identical to SEQ ID NO: 94
  misc_feature (1)..(652): n = a, t, g, or c

SEQ ID NO: 215 - DNA, 613 bp, Homo sapiens
  misc_feature (1)..(613): n = a, t, g, or c
ttgtttacttatttatttattttcaccaccaacattattagccatgcctttctgctaatcgattttagcaagtcgaggtaaaacacatgcaacattttctggcaaaagcttaatgtcaaacaatatgtgatccatactgtgtgtcgtccttgggggtttatttgactttgtcacaatgacagccaacagcgagactgataagcctgtaaaaataaaaaaataagactaatcaaatagacatggcattttaatctcaaagtgcaaaatcatctaactgaaaatgacggcattgaaaaattccagtggttaaaaatgaatcaaaacttcattacgcaggcagtggaagtgtgttgaaagatttaccaggggtgtcaagttttagacactcagaaaggcaccattctagccatcttgattggataacatgtatatacttatgtccctacgatattcaaaagataatactgtnttagtacaaaacaaacaaacaagcaaaaaatcaaaaccaagccaacccaaattccccaacctttctttctactcttggcagatagtaaattataacgatgagtcttcgtgtgcacacccgcttgctcacatggctcactagctt

SEQ ID NO: 216 - DNA, 669 bp, Homo sapiens; identical to SEQ ID NO: 95
  misc_feature (1)..(669): n = a, t, g, or c

SEQ ID NO: 217 - DNA, 739 bp, Homo sapiens; identical to SEQ ID NO: 96

SEQ ID NO: 218 - DNA, 531 bp, Homo sapiens
  misc_feature (1)..(531): n = a, t, g, or c
tgagttnatacctttaaaatttattacataagctatacacacaaaatgaaatcctagttataaaagatgcatctagaagaataatttataataaaccaacaaaaatgagaatgtgtatctccaggaatataaatatatttaaatgttctcagtgactggcattgctttatgcattacataagatagtatgtactaattaaggtattgaattcactgggttttagaaggctttaaaaaaaatccagataaatcaacaacaaaaatacagctcaactttgaactgcattaaaatccagaatctctcattttagatgaccattccttattcccctcaaaaggtttccaacagaagctatttcacaaactgattattagaatgtcttctccccactctccccaaaagcaagtatgcatggaagtgcatgcttttaaccttaagaaatgtatttttggtaccattaatataaaattataatatttatatttataaaattgtatataaaaagtatcaatagactataacctaaacag

SEQ ID NO: 219 - DNA, 2648 bp, Homo sapiens; identical to SEQ ID NO: 98

SEQ ID NO: 220 - DNA, 566 bp, Homo sapiens; identical to SEQ ID NO: 99

SEQ ID NO: 221 - DNA, 2326 bp, Homo sapiens
ccatcctaatacgactcactatagggctcgagcggccgcccgggcaggtacgccctatacaacttggcttcacatacttttacactaactttatatgatttttaaaaactggtctgatcggacttctcgtcctgggacactgtttactggagtctggccggctctccgtgctcctcttggtacctcattttggggagaaccttaaacccactcgagcagataatctccgccttgaccggtgccaccaaagaagggttggaaccatgtggacttttctgggcattgccactttcacctatttttataagaagttcggggacttcatcactttggccaacagggaggtcctgttgtgcgtgctggtgttcctctcgctgggcctggtgctctcctaccgctgtcgccaccgaaacgggggtctcctcgggcgccagcggagcggctcccagttcgccctcttctcggatattctctcaggcctgcctttcattggcttcttctgggccaaatccccccctgaatcagaaaataaggagcagctcggggccaggaggcgcagaaaaggaaccaatatttcagaaacaagcttaataggaacagctgcctgtacatcaacatcttctcagaatgacccagaagttatcatcgtgggagctggcgtgcttggctctgctttggtagctgtgctttccagagatggaagaaaggtgacagtcattgagagagacttaaaagagcctgacagaatagttggagaattcctgcagccgggtggttatcatgttctcaaagaccttggtcttggagatacagtggaaggtcttgatgcccaggttgtaaatggttacatgattcatgatcaggaaagcaaatcagaggttcagattccttaccctctgtcagaaaacaatcaagtgcagagtggaagagctttccatcacggaagattcatcatgagtctccggaaagcagctatggcagagcccaatgcaaagtttattgaaggtgttgtgttacagttattagaggaagatgatgttgtgatgggagttcagtacaaggataaagagactggagatatcaaggaactccatgctccactgactgttgttgcagatgggcttttctccaagttcaggaaaagcctggtctccaataaagtttctgtatcatctcattttgttggctttcttatgaagaatgcaccacagtttaaagcaaatcatgctgaacttattttagctaacccgagtccagttctcatctaccggatttcatccagtgaaactcgagtacttgttgacattagaggagaaatgccaaggaatttaagagaatacatggttgaaaaaatttacccacaaatacctgatcacctgaaagaaccattcttagaagccactgacaattctcatctgaggtccatgctagcaagcttccttcctccttcatcagtgaagaaacgaggtgttcttcttttgggagacgcatataatatgaggcatccacttactggtggaggaatgactgttgcttttaaagatataaaactatggagaaaactgctaaagggtatccctgacctttatgatgatgcagctattttcgaggccaacaaatcattttactgggcaagaaaaacatctcattcctttgtcgtgaatatccttgctcaggctctttatgaattattttctgccacagatgattccctgcatcaactaagaaaagcctgttttctttatttcaaacttggtggcgaatgtgttgcgggtcctgttgggctgctttctgtattgtctcctaaccctctagctttaattggacacttctttgctgttgcaatctatgccgtgtatttttgctttaagtcagaaccttggattacaaaacctcgagcccttctcagtagtagtgctgtattgtacaaagcgtgttctgtaatatttcctctaatttactcagaaatgaagtatatggttcattaagcttaaaggggaaccatttgtgaatgaatatttggaacttaccaagtcctaagagacttttggaagaggatatatatagcatagtaccataccacttataaagtggaaactcttggaccaagatttggattaatttgtttttgaagttttttgtatataaatatgtaaatacatgctttaatttgcaatttaaaatgaaggggttaaataagttagacatttgaaagaaatgattgttaccataaattagtgctaatgctgaggagaactacagtttttcttttgaatttagtatttgagatgagttgttgggacatgcaaataaaatgaagaatgac

SEQ ID NO: 222 - DNA, 364 bp, Homo sapiens
ggtcgacttttttttttttttttctaccactggtagggtaatgaattagaggtaggtaattcggtatgataatttcagaataccaactaataccaccaaagtagaattggtgtcaaattcacaatgagaatgggctgtttcttaattctgttaggtgtcttaaaaagctcatcatctaagatatgtacacattgaaaatttcatatacagctaataacctaaatgttgcccaataaattaaattggctacccttcctattccagatatccagtaaaattggtgatttccaaaagcactattcaaatataaaatgtgaatcttaaaagatttaaattttattgcaaccacagaatgattcaatat

SEQ ID NO: 223 - DNA, 499 bp, Homo sapiens; identical to SEQ ID NO: 100

SEQ ID NO: 224 - DNA, 816 bp, Homo sapiens
  misc_feature (1)..(816): n = a, t, g, or c
tnnnnnttccccgagagtgaaggcagctggnttgctcctactttcaggaagggatgcaggctcccctgaggaatatgtcatagttctgagctgccagtggaccgcccttttcccctaccaatattaggtgatcccgttttccccatgacaatgttgtagtgtcccccacccccaccccccaggncaagcactggaaactgctgcctctgttgaggtcggtgctgcgcttccgcctcgggggcctagcctgtcagactgccttggtcttccacctggacaccctgggggccagcatggacgctggcacaatcttgagagggtcagccttgctgagcctatgtctgcagcacttcttgggaggcctggtcaccacagtcancttcactgggatgatgcgctgcaggcagntggcccccagggncctgcaggncacacactacagccttctgggcacgttggagctgntggggaagttgttgttgggcactctggccggggcctggttgatgggtgggggcanatcccggttcttggtccngttaatcnctntngctttcccgncctgncctggncnagaaccggaccttntttaantgatggttgggnggnataagcaattgctgggccgattcttggtttnccngnaatanaaaaaaaaaaaanntnnaaaaannnnnnnnnnnnnnaaaanntnnaaanatnnannnnnnnnaannnnnnnnnnnnnnnnnnnnnnnnnnnnnnnnnnnnnnnnnnnnnnnnnnnnnnnnnnnnnnnncnnnnnnnnnnnnnnnnnnnnnnnnnnnnnnnnnnncc

SEQ ID NO: 225 - DNA, 463 bp, Homo sapiens
ctgggagtccacggtgtttattgggccaccccacgcatggccgtggccagggtggcagcgaccctcaccctggtctgtcatgcctgtttttcctacactcagcggcaaagctgcaggagcagggctgagcctggaatagcccttcctagtcccctcttctcagcccactacccatccatcagtcaccagccgtcacctcccctcccgtgctccaggctgggggagggagagcccagtggtggatccagcctgaagtcctgccctctctcatctgtctggaaaggaggtagcacctttttcgggaaacgggttagggagtaaagactgcaccctacatggtcctggtggtgggggggataacagtaaaggaatttgcaacgttttaatgccatgcctgatttttgggtcaggagtggtgacttgggtaaccacttggcgggggggcctgggattccctgctgtg

SEQ ID NO: 226 - DNA, 612 bp, Homo sapiens
  misc_feature (1)..(612): n = a, t, g, or c
caggtctgaccagtctttaatgggcaggcaggtgcccgaggcagcctccagcatgaggcgggacaggcattgcccggaggtcctctgggtggggagggcatgctcggtgcttgctgccagctggagccagggctgaggcgtgcagggatcctggccctcacggccaccctgggtgcttcaaggatgagggcggagctggcttcactggggcacagggctgggggcagcctccagtcttgccctgctgggcctttcggctccagttgaggaggggccggggactggcccacgtggatgccggggtcttgcaaccatgctccctctggctccttagaagccccctggggcccagcaggacgggccggcggtcccccaagcttggcagtctagagctgggcagcagcgacaccacctgcaggctggcgcccgcctctcccgcagccttcagctccgtcaccacctttcggtgtctccaccacctgcatggctgcccattcactgacacaatgagtcgccctccttcaggccagccgccgcggcctggctcccctggatgacgggcaggatgaggacaangcagtctcccccggagcggaggccaaagccgccctc

SEQ ID NO: 227 - DNA, 378 bp, Homo sapiens; identical to SEQ ID NO: 101
  misc_feature (1)..(378): n = a, t, g, or c

SEQ ID NO: 228 - DNA, 401 bp, Homo sapiens; identical to SEQ ID NO: 102
  misc_feature (1)..(401): n = a, t, g, or c

SEQ ID NO: 229 - DNA, 237 bp, Homo sapiens; identical to SEQ ID NO: 103

SEQ ID NO: 230 - DNA, 4036 bp, Homo sapiens; identical to SEQ ID NO: 14

SEQ ID NO: 231 - DNA, 311 bp, Homo sapiens
  misc_feature (1)..(311): n = a, t, g, or c
agtaacagaaaaaaatatatatatttcaaaggtaactagttttgttttactcaaactatttacaacaaggggcagagtagagacatgaatagctgcacaagttattttaattataaattaataaaagcctacattaaattcatcttattaactacttatgagagtgtataaaanctgatgaagccaacattatttggtacttctgatacttccattcgcttcaacttttctttctaaatagaaaattaaaagatggcaagccatttacaaaaagncatgtaatttntgttaatcaggttgacattttgaac

SEQ ID NO: 232 - DNA, 454 bp, Homo sapiens
  misc_feature (1)..(454): n = a, t, g, or c
gagaagacgacagaagggcaacagtacaggaagttgggtagatgtggggacaacagagagactgtggcagaggcaggactgcagatctatggaaattgcctggaagagtcagctgtaagggatgagaatcctgagggtaaaagagaaaagggaaagactcctctttgatcttatgaagctgaatacnaagatctaacatgagtgagattctgttgccccactttaagtgactttaatccaaaggtaaaacccgattggttttttagtttgataggggaaaatgaaacctctttttgagctcaaaaaaaaaaaaaaaaaaaaagcgttccccatggangcgacatgatgagaggaatgtgaccgggattcgggaacgtctgggggggggccacttcctttatggggaggcgattaattctgcgatcatggaccaacctgttccccgggggaaaaa

SEQ ID NO: 233 - DNA, 463 bp, Homo sapiens; identical to SEQ ID NO: 13
  misc_feature (1)..(463): n = a, t, g, or c

SEQ ID NO: 234 - DNA, 281 bp, Homo sapiens; identical to SEQ ID NO: 12
  misc_feature (1)..(281): n = a, t, g, or c

SEQ ID NO: 235 - DNA, 415 bp, Homo sapiens; identical to SEQ ID NO: 10
  misc_feature (1)..(415): n = a, t, g, or c

SEQ ID NO: 236 - DNA, 492 bp, Homo sapiens; identical to SEQ ID NO: 9
  misc_feature (1)..(492): n = a, t, g, or c

SEQ ID NO: 237 - DNA, 478 bp, Homo sapiens; identical to SEQ ID NO: 8

SEQ ID NO: 238 - DNA, 10211 bp, Homo sapiens; identical to SEQ ID NO: 6

SEQ ID NO: 239 - DNA, 2740 bp, Homo sapiens; identical to SEQ ID NO: 5

SEQ ID NO: 240 - DNA, 744 bp, Homo sapiens; identical to SEQ ID NO: 107
  misc_feature (1)..(744): n = a, t, g, or c

SEQ ID NO: 241 - DNA, 2384 bp, Homo sapiens; identical to SEQ ID NO: 3

SEQ ID NO: 242 - DNA, 452 bp, Homo sapiens; identical to SEQ ID NO: 62

SEQ ID NO: 243 - DNA, 1686 bp, Homo sapiens; identical to SEQ ID NO: 2

SEQ ID NO: 244 - DNA, 1658 bp, Homo sapiens; identical to SEQ ID NO: 17

SEQ ID NO: 245 - DNA, 1067 bp, Homo sapiens; identical to SEQ ID NO: 16

SEQ ID NO: 246 - DNA, 553 bp, Homo sapiens; identical to SEQ ID NO: 15
  misc_feature (1)..(553): n = a, t, g, or c

SEQ ID NO: 247 - DNA, 365 bp, Homo sapiens; identical to SEQ ID NO: 22

SEQ ID NO: 248 - DNA, 3885 bp, Homo sapiens; identical to SEQ ID NO: 21

SEQ ID NO: 249 - DNA, 923 bp, Homo sapiens; identical to SEQ ID NO: 20
  misc_feature (1)..(923): n = a, t, g, or c

SEQ ID NO: 250 - DNA, 1585 bp, Homo sapiens; identical to SEQ ID NO: 19

SEQ ID NO: 251 - DNA, 655 bp, Homo sapiens; identical to SEQ ID NO: 18

SEQ ID NO: 252 - DNA, 1771 bp, Homo sapiens; identical to SEQ ID NO: 24

SEQ ID NO: 253 - DNA, 3492 bp, Homo sapiens; identical to SEQ ID NO: 23

SEQ ID NO: 254 - DNA, 652 bp, Homo sapiens; identical to SEQ ID NO: 25
  misc_feature (1)..(652): n = a, t, g, or c

SEQ ID NO: 255 - DNA, 840 bp, Homo sapiens; identical to SEQ ID NO: 26

SEQ ID NO: 256 - DNA, 635 bp, Homo sapiens; identical to SEQ ID NO: 29
  misc_feature (1)..(635): n = a, t, g, or c

SEQ ID NO: 257 - DNA, 836 bp, Homo sapiens; identical to SEQ ID NO: 28

SEQ ID NO: 258 - DNA, 1546 bp, Homo sapiens; identical to SEQ ID NO: 27

SEQ ID NO: 259 - DNA, 344 bp, Homo sapiens; identical to SEQ ID NO: 38
  misc_feature (1)..(344): n = a, t, g, or c

SEQ ID NO: 260 - DNA, 580 bp, Homo sapiens; identical to SEQ ID NO: 37

SEQ ID NO: 261 - DNA, 944 bp, Homo sapiens; identical to SEQ ID NO: 36
  misc_feature (1)..(944): n = a, t, g, or c

SEQ ID NO: 262 - DNA, 640 bp, Homo sapiens; identical to SEQ ID NO: 35
  misc_feature (1)..(640): n = a, t, g, or c

SEQ ID NO: 263 - DNA, 582 bp, Homo sapiens; identical to SEQ ID NO: 34
  misc_feature (1)..(582): n = a, t, g, or c

SEQ ID NO: 264 - DNA, 419 bp, Homo sapiens; identical to SEQ ID NO: 33

SEQ ID NO: 265 - DNA, 1203 bp, Homo sapiens; identical to SEQ ID NO: 32

SEQ ID NO: 266 - DNA, 707 bp, Homo sapiens; identical to SEQ ID NO: 31

SEQ ID NO: 267 - DNA, 539 bp, Homo sapiens; identical to SEQ ID NO: 30
  misc_feature (1)..(539): n = a, t, g, or c

SEQ ID NO: 268 - DNA, 773 bp, Homo sapiens; identical to SEQ ID NO: 160
  misc_feature (1)..(773): n = a, t, g, or c

SEQ ID NO: 269 - DNA, 704 bp, Homo sapiens; identical to SEQ ID NO: 51

SEQ ID NO: 270 - DNA, 1976 bp, Homo sapiens; identical to SEQ ID NO: 50

SEQ ID NO: 271 - DNA, 2295 bp, Homo sapiens; identical to SEQ ID NO: 49

SEQ ID NO: 272 - DNA, 995 bp, Homo sapiens; identical to SEQ ID NO: 48

SEQ ID NO: 273 - DNA, 1421 bp, Homo sapiens; identical to SEQ ID NO: 47

SEQ ID NO: 274 - DNA, 916 bp, Homo sapiens; identical to SEQ ID NO: 158
  misc_feature (1)..(916): n = a, t, g, or c

SEQ ID NO: 275 - DNA, 529 bp, Homo sapiens
ccaggcttggggctaagtcccagtgtccatatgaagctgtttctggccttgtccgtttttgttgtcccaggctctgtgcccctcactcagtcaagaacttgtctttgtgttgcttcttggggacatgctcagggcagaagtcagagcggaggaggcgggaaaagtagattatgatcatcacgtccagcatgagcaggatacccagcaggaaggtgcccagggtcctctggttcacataacgcaagaagaaatgggtgaggtaggcctgaggggccaggcggaagagaaagtacatgaccaggttcacatacttgttaacccggtagaggagatgatcctgggcattactgattttcatcatcatgcgaatggtgaggaagatgttgctgacttccaccagtagtgttaagacacccgcaccgacaaagctgctccaaaagatgccggagaagaaggcacccatggccatgacgtgatggacaaggtatttccaagatgctcgcgtctgttcgctagccacgatgtccac

SEQ ID NO: 276 - DNA, 1982 bp, Homo sapiens; identical to SEQ ID NO: 44

SEQ ID NO: 277 - DNA, 462 bp, Homo sapiens; identical to SEQ ID NO: 43

SEQ ID NO: 278 - DNA, 482 bp, Homo sapiens; identical to SEQ ID NO: 42

SEQ ID NO: 279 - DNA, 822 bp, Homo sapiens
  misc_feature (1)..(822): n = a, t, g, or c
aaaaaaaaaagtcctgtggaaatcatatagacaaacatttgcaaagctgctactgccattgtaccagtgttaaactgtgttctaccttgcatcttttactgatttttatgacagattttatattggtaaccattcgagaactctgtaagtgctatggcttccttaaactacgatttatcatatgctcccagtgtttactttgagactgaatggcaaccagagaatgtaaacaaccaaggtgcatctggttatgttttaaaataaagattaataaaagttaaggtaaaaggtctgtgtctgaacctatgcattttttcacctctgaggaggatactaatacctaatgagaaaagctgaaatgtgtgggccgcgggtggcgggtgcgctacatggcgctaatggatactctcagacagcttgaggggagggcgcgcaggcaggtcagaaatcgagcctggaggctcggagaagaattcggagttacccaggggcgtgggaccctaagcgagtggagtggaacacccttgattctcgtgagtggagaggtgtcaccaaaaatattgagnccggggcggactattaggacagaactaccatgatcatatccacgaggtgctaaactggtgcgacaagggtctgaaggcgcagtaaatcagaggcgtggtaacaccccgctaaggagtgggccgtaagtgtcctggcgcctgggatgtccagagaagattcgggggggccaataagggcaagtaacccaggattctggcaggcaacactaacttcagttcgaaccgggttccccggtggcggttacaacacaagccc

SEQ ID NO: 280 - DNA, 773 bp, Homo sapiens; identical to SEQ ID NO: 39

SEQ ID NO: 281 - DNA, 2150 bp, Homo sapiens; identical to SEQ ID NO: 52

SEQ ID NO: 282 - DNA, 463 bp, Homo sapiens; identical to SEQ ID NO: 53

SEQ ID NO: 283 - DNA, 538 bp, Homo sapiens; identical to SEQ ID NO: 56
  misc_feature (1)..(538): n = a, t, g, or c

SEQ ID NO: 284 - DNA, 1388 bp, Homo sapiens; identical to SEQ ID NO: 55

SEQ ID NO: 285 - DNA, 931 bp, Homo sapiens
tttttttttttttggacataagaacagtgtgattttaatcacttaagactggtgcattattcaatttggagactgaaatactggtttccctttcaactgattaggaaagggtctgagctggcagaagttaatcctcacattattcagctaatgagagacagaatcctaaaacctgattccaacttccgcctgtacctcacaaggcaagacaaagcctttcatttaaaggtggtacacatataaggaccatataatcgggattaactttaggtaacaataacttaaaagataggaaaaggtatcaatatacagagatttaaaaaatggtctatacaataaagtgatgaagaaaactaacaataaacaggacgacgttcaaatactgaatacaattaacaaagggggccaaaagatcaacatttatctctcatcatctttcatgcaaggtctcagctttcttctcccaaacataagggcagattaattcaaagtagccctatgaagaatattggtttatcacgccggaatcccagcacttggggaggccgaggtggggggatcacctgaggtcaggagttcaagaccagcctgaccaatatggtgaaatccatctctactaaaaatacaaaattagcaggtgtggtagccaatactgagccagctactaggaggctggaccgggaattgctggacccagaatggggttcggggccaaatcgcgcctggcatccaggcgggaaggggggaccctctgcacaaaaaacttgttcccggaataatggggggcggttaacgacggtgctccaatataaaccccaacggcagttacagcaaaaacggggattgaggaataaacagatcagcttgcgaaagaccacacgacaagggccagtccagaagaggagcgcactcacgccaacacacaacacgg

SEQ ID NO: 286 - DNA, 508 bp, Homo sapiens; identical to SEQ ID NO: 67
  misc_feature (1)..(508): n = a, t, g, or c

SEQ ID NO: 287 - DNA, 530 bp, Homo sapiens; identical to SEQ ID NO: 66

SEQ ID NO: 288 - DNA, 3248 bp, Homo sapiens; identical to SEQ ID NO: 65

SEQ ID NO: 289 - DNA, 1755 bp, Homo sapiens; identical to SEQ ID NO: 64

SEQ ID NO: 290 - DNA, 481 bp, Homo sapiens; identical to SEQ ID NO: 63

SEQ ID NO: 291 - DNA, 3101 bp, Homo sapiens
tagggcgcgggtctccctcctcccggagtttggaacggctgaagttcaccttccagcccctagcgccgttcgcgccgctaggcctggcttctgaggcggttgcggtgctcggtcgccgcctaggcggggcagggtgcgagcaggggcttcgggccacgcttctcttggcgacaggattttgctgtgaagtccgtccgggaaacggaggaaaaaaagagttgcgggaggctgtcggctaataacggttcttgatacatatttgccagacttcaagatttcagaaaaggggtgaaagagaagattgcaactttgagtcagacctgtaggcctgatagactgattaaaccacagaaggtgacctgctgagaaaagtggtacaaatactgggaaaaacctgctcttctgcgttaagtgggagacaatgtcacaagttaaaagctcttattcctatgatgccccctcggatttcatcaatttttcatccttggatgatgaaggagatactcaaaacatagattcatggtttgaggagaaggccaatttggagaataagttactggggaagaatggaactggagggctttttcagggcaaaactcctttgagaaaggctaatcttcagcaagctattgtcacacctttgaaaccagttgacaacacttactacaaagaggcagaaaaagaaaatcttgtggaacaatccattccgtcaaatgcttgttcttccctggaagttgaggcagccatatcaagaaaaactccagcccagcctcagagaagatctcttaggctttctgctcagaaggatttggaacagaaagaaaagcatcatgtaaaaatgaaagccaagagatgtgccactcctgtaatcatcgatgaaattctaccctctaagaaaatgaaagtttctaacaacaaaaagaagccagaggaagaaggcagtgctcatcaagatactgctgaaaagaatgcatcttccccagagaaagccaagggtagacatactgtgccttgtatgccacctgcaaagcagaagtttctaaaaagtactgaggagcaagagctggagaagagtatgaaaatgcagcaagaggtggtggagatgcggaaaaagaatgaagaattcaagaaacttgctctggctggaatagggcaacctgtgaagaaatcagtgagccaggtcaccaaatcagttgacttccacttccgcacagatgagcgaatcaaacaacatcctaagaaccaggaggaatataaggaagtgaactttacatctgaactacgaaagcatccttcatctcctgcccgagtgactaagggatgtaccattgttaagcctttcaacctgtcccaaggaaagaaaagaacatttgatgaaacagtttctacatatgtgccccttgcacagcaagttgaagacttccataaacgaacccctaacagatatcatttgaggagcaagaaggatgatattaacctgttaccctccaaatcttctgtgaccaagatttgcagagacccacagactcctgtactgcaaaccaaacaccgtgcacgggctgtgacctgcaaaagtacagcagagctggaggctgaggagctcgagaaattgcaacaatacaaattcaaagcacgtgaacttgatcccagaatacttgaaggtgggcccatcttgcccaagaaaccacctgtgaaaccacccaccgagcctattggctttgatttggaaattgagaaaagaatccaggagcgagaatcaaagaagaaaacagaggatgaacactttgaatttcattccagaccttgccctactaagattttggaagatgttgtgggtgttcctgaaaagaaggtacttccaatcaccgtccccaagtcaccagcctttgcattgaagaacagaattcgaatgcccaccaaagaagatgaggaagaggacgaaccggtagtgataaaagctcaacctgtgccacattatggggtgccttttaagccccaaatcccagaggcaagaactgtggaaatatgccctttctcctttgattctcgagacaaagaacgtcagttacagaaggagaagaaaataaaagaactgcagaaaggggaggtgcccaagttcaaggcacttcccttgcctcattttgacaccattaacctgccagagaagaaggtaaagaatgtgacccagattgaacctttctgcttggagactgacagaagaggtgctctgaaggcacagacttggaagcaccagctggaagaagaactgagacagcagaaagaagcagcttgtttcaaggctcgtccaaacaccgtcatctctcaggagccctttgttcccaagaaagagaagaaatcagttgctgagggcctttctggttctctagttcaggaaccttttcagctggctactgagaagagagccaaagagcggcaggagctggagaagagaatggctgaggtagaagcccagaaagcccagcagttggaggaggccagactacaggaggaagagcagaaaaaagaggagctggccaggctacggagagaactggtgcataaggcaaatccaatacgcaagtaccagggtctggagataaagtcaagtgaccagcctctgactgtgcctgtatctcccaaattctccactcgattccactgctaaactcagctgtgagctgcggataccgcccggcaatgggacctgctcttaacctcaaacctaggaccgtcttgctttgtcattgggcatggagagaacccatttctccagacttttacctacccgtgcctgagaaagcatacttgacaactgtggactccagttttgttgagaattgttttcttacattactaaggctaataatgagatgtaactcatgaatgtctcgattagactccatgtagttacttcctttaaaccatcagccggccttttatatgggtcttcactctgactagaatttagtctctgtgtcagcacagtgtaatctctattgctattgccccttacgactctcaccctctccccactttttttaaaaattttaaccagaaaataaagatagttaaatcctggaaaaaaaaaaaaaaaaaaaaaa

SEQ ID NO: 292 - DNA, 2253 bp, Homo sapiens; identical to SEQ ID NO: 61

SEQ ID NO: 293 - DNA, 2813 bp, Homo sapiens; identical to SEQ ID NO: 60

SEQ ID NO: 294 - DNA, 783 bp, Homo sapiens; identical to SEQ ID NO: 59

SEQ ID NO: 295 - DNA, 522 bp, Homo sapiens; identical to SEQ ID NO: 58

SEQ ID NO: 296 - DNA, 1674 bp, Homo sapiens; identical to SEQ ID NO: 70

SEQ ID NO: 297 - DNA, 189 bp, Homo sapiens
agggcctaagggtgacagaggtgatgctggtcccaaaggtgctgatggctctcctggcaaagatggcgtccgtggtctgaccggccccattggtcctcctggccctgctggtgcccctggtgacaagggggaccccattcccgaggagctttatgagatgctgagtgaccactcgatccgctcctttga

SEQ ID NO: 298 - DNA, 278 bp, Homo sapiens; identical to SEQ ID NO: 68

SEQ ID NO: 299 - DNA, 480 bp, Homo sapiens; identical to SEQ ID NO: 78

SEQ ID NO: 300 - DNA, 4217 bp, Homo sapiens; identical to SEQ ID NO: 195

SEQ ID NO: 301 - DNA, 221 bp, Homo sapiens; identical to SEQ ID NO: 77

SEQ ID NO: 302 - DNA, 3866 bp, Homo sapiens; identical to SEQ ID NO: 74

SEQ ID NO: 303 - DNA, 564 bp, Homo sapiens; identical to SEQ ID NO: 73

SEQ ID NO: 304 - DNA, 2235 bp, Homo sapiens; identical to SEQ ID NO: 72

SEQ ID NO: 305 - DNA, 867 bp, Homo sapiens; identical to SEQ ID NO: 188
  misc_feature (1)..(867): n = a, t, g, or c

SEQ ID NO: 306 - DNA, 1452 bp, Homo sapiens
ttggtttctgctgggtgtaggtccttggctggtcgggctccggtgttctgcttctccccgctgagctgctgcctggtgaagaggaagccatggcgctccgagtcaccaggaactcgaaaattaatgctgaaaataaggcgaagatcaacatggcaggcgcaaagcgcgttcctacggcccctgctgcaacctccaagcccggactgaggccaagaacagctcttggggacattggtaacaaagtcagtgaacaactgcaggccaaaatgcctatgaagaaggaagcaaaaccttcagctactggaaaagtcattgataaaaaactaccaaaacctcttgaaaaggtacctatgctggtgccagtgccagtgtctgagccagtgccagagccagaacctgagccagaacctgagcctgttaaagaagaaaaactttcgcctgagcctattttggttgatactgcctctccaagcccaatggaaacatctggatgtgcccctgcagaagaagacctgtgtcaggctttctctgatgtaattcttgcagtaaatgatgtggatgcagaagatggagctgatccaaacctttgtagtgaatatgtgaaagatatttatgcttatctgagacaacttgaggaagagcaagcagtcagaccaaaatacctactgggtcgggaagtcactggaaacatgagagccatcctaattgactggctagtacaggttcaaatgaaattcaggttgttgcaggagaccatgtacatgactgtctccattattgatcggttcatgcagaataattgtgtgcccaagaagatgctgcagctggttggtgtcactgccatgtttattgcaagcaaatatgaagaaatgtaccctccagaaattggtgactttgcttttgtgactgacaacacttatactaagcaccaaatcagacagatggaaatgaagattctaagagctttaaactttggtctgggtcggcctctacctttgcacttccttcggagagcatctaagattggagaggttgatgtcgagcaacatactttggccaaatacctgatggaactaactatgttggactatgacatggtgcactttcctccttctcaaattgcagcaggagctttttgcttagcactgaaaattctggataatggtgaatggacaccaactctacaacattacctgtcatatactgaagaatctcttcttccagttatgcagcacctggctaagaatgtagtcatggtaaatcaaggacttacaaagcacatgactgtcaagaacaagtatgccacatcgaagcatgctaagatcagcactctaccacagctgaattctgcactagttcaagatttagccaaggctgtggcaaaggtgtaacttgtaaacttgagttggagtactatactttacaaactaaaattggcacatgtgcatctgt

SEQ ID NO: 307 - DNA, 460 bp, Homo sapiens; identical to SEQ ID NO: 82

SEQ ID NO: 308 - DNA, 2066 bp, Homo sapiens; identical to SEQ ID NO: 81

SEQ ID NO: 309 - DNA, 762 bp, Homo sapiens; identical to SEQ ID NO: 79
  misc_feature (1)..(762): n = a, t, g, or c

SEQ ID NO: 310 - DNA, 1779 bp, Homo sapiens; identical to SEQ ID NO: 83

SEQ ID NO: 311 - DNA, 2600 bp, Homo sapiens; identical to SEQ ID NO: 88

SEQ ID NO: 312 - DNA, 483 bp, Homo sapiens; identical to SEQ ID NO: 87

SEQ ID NO: 313 - DNA, 572 bp, Homo sapiens; identical to SEQ ID NO: 205
  misc_feature (1)..(572): n = a, t, g, or c

SEQ ID NO: 314 - DNA, 538 bp, Homo sapiens
agacatttacaggtatttatttgagtaagagctcataaaatatatttttataatatgcacaagaaaaaatacatttgaatgaataaaaaataaaatgacaggaggtgacagaatttagtgtttataaatgaggtcataaagaactttaataattcagagaagaagttcaaagtgtatttaaaagttgagaccctgctttacaatattttataattttaaaaaaaggcgtttaaaggtgataggtgacttaataattttccactttcaaaatgggtttctagacactgttgttcatgaaccaaaaacaaacaaacaaacaaacaacaacaaaacccaaacactttggcaagcaaagtattattagtacatagcagcttcataacagtttacttttttaatataaagatttttcaatttacacttgtaggagtagaaaaaactaatatgctaagtctgtaagctacgcagcaaaaataatgatcttaatgaagccagaattctgtgaaaatgtgcaccacactgcatatatagtagctga

SEQ ID NO: 315 - DNA, 1633 bp, Homo sapiens; identical to SEQ ID NO: 85

SEQ ID NO: 316 - DNA, 499 bp, Homo sapiens; identical to SEQ ID NO: 100

SEQ ID NO: 317 - DNA, 2326 bp, Homo sapiens; identical to SEQ ID NO: 221

SEQ ID NO: 318 - DNA, 566 bp, Homo sapiens; identical to SEQ ID NO: 99

SEQ ID NO: 319 - DNA, 2648 bp, Homo sapiens; identical to SEQ ID NO: 98

SEQ ID NO: 320 - DNA, 531 bp, Homo sapiens; identical to SEQ ID NO: 218
  misc_feature (1)..(531): n = a, t, g, or c

SEQ ID NO: 321 - DNA, 2124 bp, Homo sapiens
gggccagatgcaaaaacattccaaaagtaatgtgtttagtagagagagactctaagctcaagttccggtttatttcatggatggaatgttaattttattatgatattaaagaaatggccttttattttacatctctcccctttttccctttccccctttattttcctccttttctttctgaaagtttccttttatgtccataaaatacaaatatattgttcataaaaaattagtatcccttttgtttggttgctgagtcacctgaaccttaattttaattggtaattacagcccctaaaaaaaacacatttcaaataggcttcccactaaactctatattttagtgtaaaccaggaattggcacactttttttagaatgggccagatggtaaatatttatgcttcacggtccatacagtctctgtcacaactattcagttctgctagtatagcgtgaaagcagctatacacaatacagaaatgaatgagtgtggttatgttctaataaaacttatttataaaaacaaggggaggctgggtttagcctgtgggccatagtttgtcaaccactggtgtaaaaccttagttatatatgatctgcattttcttgaactgatcattgaaaacttataaacctaacagaaaagccacataatatttagtgtcattatgcaataatcacattgcctttgtgttaatagtcaaatacttacctttggagaatacttacctttggaggaatgtataaaatttctcaggcagagtcctggatataggaaaaagtaatttatgaagtaaacttcagttgcttaatcaaactaatgatagtctaacaactgagcaagatcctcatctgagaatgcttaaaatgggatccccagagaccattaaccaatactggaactggtatctagctactgatgtcttactttgagtttatttatgcttcagaatacagttgtttgccctgtgcatgaatatacccatatttgtgtgtggatatgtgaagcttttccaaatagagctctcagaagaattaagtttttacttctaattattttgcattactttgagttaaatttgaatagagtattaaatataaagttgtagattcttatgtgtttttgtattagcccagacatctgtaatgtttttgcactggtgacagacaaaatctgttttaaaatcatatccagcacaaaaactatttctggctgaatagcacagaaaagtattttaacctacctgtagagatcctcgtcatggaaaggtgccaaactgttttgaatggaaggacaagtaagagtgaggccacagttcccaccacacgagggcttttgtattgttctactttttcagccctttactttctggctgaagcatccccttggagtgccatgtataagttgggctattagagttcatggaacatagaacaaccatgaatgagtggcatgatccgtgcttaatgatcaagtgttacttatctaataatcctctagaaagaaccctgttagatcttggtttgtgataaaaatataaagacagaagacatgaggaaaaacaaaaggtttgaggaaatcaggcatatgactttatacttaacatcagatcttttctataatatcctactactttggttttcctagctccataccacacacctaaacctgtattatgaattacatattacaaagtcataaatgtgccatatggatatacagtacattctagttggaatcgtttactctgctagaatttaggtgtgagattttttgtttcccaggtatagcaggcttatgtttggtggcattaaattggtttctttaaaatgctttggtggcacttttgtaaacagattgcttctagattgttacaaaccaagcctaagacacatctgtgaatacttagatttgtagcttaatcacattctagacttgtgagttgaatgacaaagcagttgaacaaaaattatggcatttaagaatttaacatgtcttagctgtaaaaatgagaaagtgttggttggttttaaaatctggtaactccatgatgaaaagaaatttattttatacgtgttatgtctctaataaagtattcatttgaaaaaaaaaaaaaaaaaaa

SEQ ID NO: 322 - DNA, 652 bp, Homo sapiens; identical to SEQ ID NO: 94
  misc_feature (1)..(652): n = a, t, g, or c

SEQ ID NO: 323 - DNA, 489 bp, Homo sapiens; identical to SEQ ID NO: 92

SEQ ID NO: 324 - DNA, 828 bp, Homo sapiens; identical to SEQ ID NO: 91
  misc_feature (1)..(828): n = a, t, g, or c

SEQ ID NO: 325 - DNA, 578 bp, Homo sapiens; identical to SEQ ID NO: 90

SEQ ID NO: 326 - DNA, 237 bp, Homo sapiens; identical to SEQ ID NO: 103

SEQ ID NO: 327 - DNA, 401 bp, Homo sapiens; identical to SEQ ID NO: 102
  misc_feature (1)..(401): n = a, t, g, or c

SEQ ID NO: 328 - DNA, 378 bp, Homo sapiens; identical to SEQ ID NO: 101
  misc_feature (1)..(378): n = a, t, g, or c

SEQ ID NO: 329 - DNA, 2828 bp, Homo sapiens; identical to SEQ ID NO: 84

SEQ ID NO: 330 - DNA, 1836 bp, Homo sapiens; identical to SEQ ID NO: 7

SEQ ID NO: 331 - DNA, 2080 bp, Homo sapiens
gtcgtgtcaggaaactggaaaaaaggtcataagcatgaagcgcagttcagtttccagcggtggtgctggccgcctctccatgcaggagttaagatcccaggatgtaaataaacaaggcctctatacccctcaaaccaaagagaaaccaacctttggaaagttgagtataaacaaaccgacatctgaaagaaaagtctcgctatttggcaaaagaactagtggacatggatcccggaatagtcaacttggtatattttccagttctgagaaaatcaaggacccgagaccacttaatgacaaagcattcattcagcagtgtattcgacaactctgtgagtttcttacagaaaatggttatgcacataatgtgtccatgaaatctctacaagctccctctgttaaagacttcctgaagatcttcacatttctttatggcttcctgtgcccctcatacgaacttcctgacacaaagtttgaagaagaggttccaagaatctttaaagaccttgggtatccttttgcactatccaaaagctccatgtacacagtgggggctcctcatacatggcctcacattgtggcagccttagtttggctaatagactgcatcaagatacatactgccatgaaagaaagctcacctttatttgatgatgggcagccttggggagaagaaactgaagatggaattatgcataataagttgtttttggactacaccataaaatgctatgagagttttatgagtggtgccgacagctttgatgagatgaatgcagagctgcagtcaaaactgaaggatttatttaatgtggatgcttttaagctggaatcattagaagcaaaaaacagagcattgaatgaacagattgcaagattggaacaagaaagagaaaaagaaccgaatcgtctagagtcgttgagaaaactgaaggcttccttacaaggagatgttcaaaagtatcaggcatacatgagcaatttggagtctcattcagccattcttgaccagaaattaaatggtctcaatgaggaaattgctagagtagaactagaatgtgaaacaataaaacaggagaacactcgactacagaatatcattgacaaccagaagtactcagttgcagacattgagcgaataaatcatgaaagaaatgaattgcagcagactattaataaattaaccaaggacctggaagctgaacaacagaagttgtggaatgaggagttaaaatatgccagaggcaaagaagcgattgaaacacaattagcagagtatcacaaattggctagaaaattaaaacttattcctaaaggtgctgagaattccaaaggttatgactttgaaattaagtttaatcccgaggctggtgccaactgccttgtcaaatacagggctcaagtttatgtacctcttaaggaactcctgaatgaaactgaagaagaaattaataaagccctaaataaaaaaatgggtttggaggatactttagaacaattgaatgcaatgataacagaaagcaagagaagtgtgagaactctgaaagaagaagttcaaaagctggatgatctttaccaacaaaaaattaaggaagcagaggaagaggatgaaaaatgtgccagtgagcttgagtccttggagaaacacaagcacctgctagaaagtactgttaaccaggggctcagtgaagctatgaatgaattagatgctgttcagcgggaataccaactagttgtgcaaaccacgactgaagaaagacgaaaagtgggaaataacttgcaacgtctgttagagatggttgctacacatgttgggtctgtagagaaacatcttgaggagcagattgctaaagttgatagagaatatgaagaatgcatgtcagaagatctctcggaaaatattaaagagattagagataagtatgagaagaaagctactctaattaagtcttctgaagaatgaagataaaatgttgatcatgtatatatatccatagtgaataaaattgtctcagtaaaaaaaaaaaaaaaaaaaaaaaaaaaaaaaaaaaaaaaaaaaaaaaaaaaaaaaaaaaaaaaa

SEQ ID NO: 332 - DNA, 480 bp, Homo sapiens; identical to SEQ ID NO: 78

SEQ ID NO: 333 - DNA, 4217 bp, Homo sapiens; identical to SEQ ID NO: 195

SEQ ID NO: 334 - DNA, 221 bp, Homo sapiens; identical to SEQ ID NO: 77

SEQ ID NO: 335 - DNA, 773 bp, Homo sapiens; identical to SEQ ID NO: 160
  misc_feature (1)..(773): n = a, t, g, or c

SEQ ID NO: 336 - DNA, 499 bp, Homo sapiens; identical to SEQ ID NO: 100

SEQ ID NO: 337 - DNA, 441 bp, Homo sapiens; identical to SEQ ID NO: 131

SEQ ID NO: 338 - DNA, 508 bp, Homo sapiens; identical to SEQ ID NO: 67
  misc_feature (1)..(508): n = a, t, g, or c

SEQ ID NO: 339 - DNA, 448 bp, Homo sapiens; identical to SEQ ID NO: 209

SEQ ID NO: 340 - DNA, 4036 bp, Homo sapiens; identical to SEQ ID NO: 14

SEQ ID NO: 341 - DNA, 479 bp, Homo sapiens; identical to SEQ ID NO: 117
  misc_feature (1)..(479): n = a, t, g, or c

SEQ ID NO: 342 - DNA, 364 bp, Homo sapiens; identical to SEQ ID NO: 222

SEQ ID NO: 343 - DNA, 473 bp, Homo sapiens; identical to SEQ ID NO: 134
  misc_feature (1)..(473): n = a, t, g, or c

SEQ ID NO: 344 - DNA, 618 bp, Homo sapiens; identical to SEQ ID NO: 76
  misc_feature (1)..(618): n = a, t, g, or c

SEQ ID NO: 345 - DNA, 716 bp, Homo sapiens
  misc_feature (1)..(716): n = a, t, g, or c
actgatagatggaatttattaagcttttcacatgtgatagcacatagttttaattgcatccaaagtactaacaaaaactctagcaatcaagaatggcagcatgttattttataacaatcaacacctgtggcttttaaaatttggttttcataagataatttatactgaagtaaatctagccatgcttttaaaaaatgctttaggtcactccaagcttggcagttaacatttggcataaacaataataaaacaatcacaatttaataaataacaaatacaacattgtaggccataatcatatacagtataaggaaaaggtggtagtgttgagtaagcagttattagaatagaataccttggcctctatgcaaatatgtctagacactttgattcactcagccctgacattcagttttcaaagtaggagacaggttctacagtatcattttacagtttccaacacattgaaaacaagtagaaaatgatgagttgatttttattaatgcattacatcctcaagagttatcaccaccccantcagtataaagattttcaagttatattagtcatataccctggtgtgcttatttaaatagtgctaatggattaggtgaagccacatggtcccctatgtgatgatatgtcattttacagctctagtctaacttcagctttgactgacatggtgcaggtctagtcaccactgacatcaggtg

SEQ ID NO: 346 - DNA, 454 bp, Homo sapiens; identical to SEQ ID NO: 232
  misc_feature (1)..(454): n = a, t, g, or c

SEQ ID NO: 347 - DNA, 2326 bp, Homo sapiens; identical to SEQ ID NO: 221

SEQ ID NO: 348 - DNA, 598 bp, Homo sapiens; identical to SEQ ID NO: 89
  misc_feature (1)..(598): n = a, t, g, or c

SEQ ID NO: 349 - DNA, 538 bp, Homo sapiens; identical to SEQ ID NO: 56
  misc_feature (1)..(538): n = a, t, g, or c

SEQ ID NO: 350 - DNA, 365 bp, Homo sapiens; identical to SEQ ID NO: 22

SEQ ID NO: 351 - DNA, 463 bp, Homo sapiens; identical to SEQ ID NO: 13
  misc_feature (1)..(463): n = a, t, g, or c

SEQ ID NO: 352 - DNA, 281 bp, Homo sapiens; identical to SEQ ID NO: 12
  misc_feature (1)..(281): n = a, t, g, or c

SEQ ID NO: 353 - DNA, 652 bp, Homo sapiens; identical to SEQ ID NO: 25
  misc_feature (1)..(652): n = a, t, g, or c

SEQ ID NO: 354 - DNA, 415 bp, Homo sapiens; identical to SEQ ID NO: 10
  misc_feature (1)..(415): n = a, t, g, or c

SEQ ID NO: 355 - DNA, 1658 bp, Homo sapiens; identical to SEQ ID NO: 17

SEQ ID NO: 356 - DNA, 2600 bp, Homo sapiens; identical to SEQ ID NO: 88

SEQ ID NO: 357 - DNA, 492 bp, Homo sapiens; identical to SEQ ID NO: 9
  misc_feature (1)..(492): n = a, t, g, or c

SEQ ID NO: 358 - DNA, 344 bp, Homo sapiens; identical to SEQ ID NO: 38
  misc_feature (1)..(344): n = a, t, g, or c

SEQ ID NO: 359 - DNA, 704 bp, Homo sapiens; identical to SEQ ID NO: 51

SEQ ID NO: 360 - DNA, 478 bp, Homo sapiens; identical to SEQ ID NO: 8

SEQ ID NO: 361 - DNA, 580 bp, Homo sapiens; identical to SEQ ID NO: 37

SEQ ID NO: 362 - DNA, 566 bp, Homo sapiens; identical to SEQ ID NO: 99

SEQ ID NO: 363 - DNA, 2578 bp, Homo sapiens
cagcagccccagcccagccagacggaatccccccaagaagcccagataatccaggccaagaagaggaaaactacccaggatgtcaaaaaaagaagagaggaggtcaccaagaaacatcagtatgaaattaggaattgttggccacctgtattatctggggggatcagtccttgcattatcattgaaacacctcacaaagaaataggaacaagtgatttctccagatttacaaattacagatttaaaaatctttttattaatccttcacctttgcctgatttaagctggggatgttcaaaagaagtctggctaaacatgttaaaaaaggagagcagatatgttcatgacaaacattttgaagttctgcattctgacttggaaccacagatgaggtccatacttctagactggcttttagaggtatgtgaagtatacacacttcatagggaaacattttatcttgcacaagacttttttgatagatttatgttgacacaaaaggatataaataaaaatatgcttcaactcattggaattacctcattattcattgcttccaaacttgaggaaatctatgctcctaaactccaagagtttgcttacgtcactgatggtgcttgcagtgaagaggatatcttaaggatggaactcattatattaaaggctttaaaatgggaactttgtcctgtaacaatcatctcctggctaaatctctttctccaagttgatgctcttaaagatgctcctaaagttcttctacctcagtattctcaggaaacattcattcaaatagctcagcttttagatctgtgtattctagccattgattcattagagttccagtacagaatactgactgctgctgccttgtgccattttacctccattgaagtggttaagaaagcctcaggtttggagtgggacagtatttcagaatgtgtagattggatggtaccttttgtcaatgtagtaaaaagtactagtccagtgaagctgaagacttttaagaagattcctatggaagacagacataatatccagacacatacaaactatttggctatgctggaggaagtaaattacataaacaccttcagaaaagggggacagttgtcaccagtgtgcaatggaggcattatgacaccaccgaagagcactgaaaaaccaccaggaaaacactaaagaagataactaagcaaacaagttggaattcaccaagattgggtagaactggtatcactgaactactaaagttttacagaaagtagtgctgtgattgattgccctagccaattcacaagttacactgccattctgattttaaaacttacaattggcactaaagaatacatttaattatttcctatgttagctgttaaagaaacagcaggacttgtttacaaagatgtcttcattcccaaggttactggatagaagccaaccacagtctataccatagcaatgtttttcctttaatccagtgttactgtgtttatcttgataaactaggaattttgtcactggagttttggactggataagtgctaccttaaagggtatactaagtgatacagtactttgaatctagttgttagattctcaaaattcctacactcttgactagtgcaatttggttcttgaaaattaaatttaaacttgtttacaaaggtttagttttgtaataaggtgactaatttatctatagctgctatagcaagctattataaaacttgaatttctacaaatggtgaaatttaatgttttttaaactagtttatttgccttgccataacacattttttaactaataaggcttagatgaacatggtgttcaacctgtgctctaaacagtgggagtaccaaagaaattataaacaagataaatgctgtggctccttcctaactggggctttcttgacatgtaggttgcttggtaataacctttttgtatatcacaatttgggtgaaaaacttaagtaccctttcaaactatttatatgaggaagtcactttactactctaagatatccctaaggaatttttttttttaatttagtgtgactaaggctttatttatgtttgtgaaactgttaaggtcctttctaaattcctccattgtgagataaggacagtgtcaaagtgataaagcttaacacttgacctaaacttctattttcttaaggaagaagagtattaaatatatactgactcctagaaatctatttattaaaaaaagacatgaaaacttgctgtacataggctagctatttctaaatattttaaattagcttttctaaaaaaaaaatccagcctcataaagtagattagaaaactagattgctagtttattttgttatcagatatgtgaatctcttctccctttgaagaaactatacatttattgttacggtatgaagtcttctgtatagtttgtttttaaactaatatttgtttcagtattttgtctgaaaagaaaacaccactaattgtgtacatatgtattatataaacttaaccttttaatactgtttatttttagcccattgtttaaaaaataaaagttaaaaaaatttaaaaa

SEQ ID NO: 364 - DNA, 944 bp, Homo sapiens; identical to SEQ ID NO: 36
  misc_feature (1)..(944): n = a, t, g, or c

SEQ ID NO: 365 - DNA, 3866 bp, Homo sapiens; identical to SEQ ID NO: 74

SEQ ID NO: 366 - DNA, 531 bp, Homo sapiens; identical to SEQ ID NO: 218
  misc_feature (1)..(531): n = a, t, g, or c

SEQ ID NO: 367 - DNA, 1674 bp, Homo sapiens; identical to SEQ ID NO: 70

SEQ ID NO: 368 - DNA, 1050 bp, Homo sapiens
ggggggggggggcacttggcttcaaagctggctcttggaaattgagcggagacgagcggcttgttgtagctgccgtgcggccgccgcggaataataagccgggatctaccataccattgactaactatggaagattataccaaaatagagaaaattggagaaggtacctatggagttgtgtataagggtagacacaaaactacaggtcaagtggtagccatgaaaaaaatcagactagaaagtgaagaggaaggggttcctagtactgcaattcgggaaatttctctattaaaggaacttcgtcatccaaatatagtcagtcttcaggatgtgcttatgcaggattccaggttatatctcatctttgagtttctttccatggatctgaagaaatacttggattctatccctcctggtcagtacatggattcttcacttgttaagagttatttataccaaatcctacaggggattgtgttttgtcactctagaagagttcttcacagagacttaaaacctcaaaatctcttgattgatgacaaaggaacaattaaactggctgattttggccttgccagagcttttggaatacctatcagagtatatacacatgaggtagtaacactctggtacagatctccagaagtattgctggggtcagctcgttactcaactccagttgacatttggagtataggcaccatatttgctgaactagcaactaagaaaccacttttccatggggattcagaaattgatcaactcttcaggattttcagagctttgggcactcccaataatgaagtgtggccagaagtggaatctttacaggactataagaatacatttcccaaatggaaaccaggaagcctagcatcccatgtcaaaaacttggatgaaaatggcttggatttgctctcgaaaatgttaatctatgatccagccaaacgaatttctggcaaaatggcactgaatcatccatattttaatgatttggacaatcagattaagaagatgtagctttctgacaaaaagtttccatatgttatg

SEQ ID NO: 369 - DNA, 1976 bp, Homo sapiens; identical to SEQ ID NO: 50

SEQ ID NO: 370 - DNA, 530 bp, Homo sapiens; identical to SEQ ID NO: 66

SEQ ID NO: 371 - DNA, 3248 bp, Homo sapiens; identical to SEQ ID NO: 65

SEQ ID NO: 372 - DNA, 3885 bp, Homo sapiens; identical to SEQ ID NO: 21

SEQ ID NO: 373 - DNA, 2124 bp, Homo sapiens; identical to SEQ ID NO: 321

SEQ ID NO: 374 - DNA, 237 bp, Homo sapiens; identical to SEQ ID NO: 103

SEQ ID NO: 375 - DNA, 2295 bp, Homo sapiens; identical to SEQ ID NO: 49

SEQ ID NO: 376 - DNA, 995 bp, Homo sapiens; identical to SEQ ID NO: 48

SEQ ID NO: 377 - DNA, 640 bp, Homo sapiens; identical to SEQ ID NO: 35
  misc_feature (1)..(640): n = a, t, g, or c

SEQ ID NO: 378 - DNA, 1421 bp, Homo sapiens; identical to SEQ ID NO: 47

SEQ ID NO: 379 - DNA, 923 bp, Homo sapiens; identical to SEQ ID NO: 20
  misc_feature (1)..(923): n = a, t, g, or c

SEQ ID NO: 380 - DNA, 1836 bp, Homo sapiens; identical to SEQ ID NO: 7

SEQ ID NO: 381 - DNA, 1585 bp, Homo sapiens; identical to SEQ ID NO: 19

SEQ ID NO: 382 - DNA, 10211 bp, Homo sapiens; identical to SEQ ID NO: 6

SEQ ID NO: 383 - DNA, 401 bp, Homo sapiens; identical to SEQ ID NO: 102
  misc_feature (1)..(401): n = a, t, g, or c

SEQ ID NO: 384 - DNA, 1771 bp, Homo sapiens; identical to SEQ ID NO: 24

SEQ ID NO: 385 - DNA, 582 bp, Homo sapiens; identical to SEQ ID NO: 34
  misc_feature (1)..(582): n = a, t, g, or c

SEQ ID NO: 386 - DNA, 916 bp, Homo sapiens; identical to SEQ ID NO: 158
  misc_feature (1)..(916): n = a, t, g, or c

SEQ ID NO: 387 - DNA, 840 bp, Homo sapiens; identical to SEQ ID NO: 26

SEQ ID NO: 388 - DNA, 652 bp, Homo sapiens; identical to SEQ ID NO: 94
  misc_feature (1)..(652): n = a, t, g, or c

SEQ ID NO: 389 - DNA, 1779 bp, Homo sapiens; identical to SEQ ID NO: 83

SEQ ID NO: 390 - DNA, 599 bp, Homo sapiens; identical to SEQ ID NO: 45

SEQ ID NO: 391 - DNA, 1982 bp, Homo sapiens; identical to SEQ ID NO: 44

SEQ ID NO: 392 - DNA, 483 bp, Homo sapiens; identical to SEQ ID NO: 87

SEQ ID NO: 393 - DNA, 378 bp, Homo sapiens; identical to SEQ ID NO: 101
  misc_feature (1)..(378): n = a, t, g, or c

SEQ ID NO: 394 - DNA, 1755 bp, Homo sapiens; identical to SEQ ID NO: 64

SEQ ID NO: 395 - DNA, 564 bp, Homo sapiens; identical to SEQ ID NO: 73

SEQ ID NO: 396 - DNA, 2740 bp, Homo sapiens; identical to SEQ ID NO: 5

SEQ ID NO: 397 - DNA, 189 bp, Homo sapiens; identical to SEQ ID NO: 297

SEQ ID NO: 398 - DNA, 462 bp, Homo sapiens; identical to SEQ ID NO: 43

SEQ ID NO: 399 - DNA, 481 bp, Homo sapiens; identical to SEQ ID NO: 63

SEQ ID NO: 400 - DNA, 1388 bp, Homo sapiens; identical to SEQ ID NO: 55

SEQ ID NO: 401 - DNA, 655 bp, Homo sapiens; identical to SEQ ID NO: 18

SEQ ID NO: 402 - DNA, 3171 bp, Homo sapiens; identical to SEQ ID NO: 177

SEQ ID NO: 403 - DNA, 744 bp, Homo sapiens; identical to SEQ ID NO: 107
  misc_feature (1)..(744): n = a, t, g, or c

SEQ ID NO: 404 - DNA, 2150 bp, Homo sapiens; identical to SEQ ID NO: 52

SEQ ID NO: 405 - DNA, 419 bp, Homo sapiens; identical to SEQ ID NO: 33

SEQ ID NO: 406 - DNA, 635 bp, Homo sapiens; identical to SEQ ID NO: 29
  misc_feature (1)..(635): n = a, t, g, or c

SEQ ID NO: 407 - DNA, 1203 bp, Homo sapiens; identical to SEQ ID NO: 32

SEQ ID NO: 408 - DNA, 1452 bp, Homo sapiens; identical to SEQ ID NO: 306

SEQ ID NO: 409 - DNA, 460 bp, Homo sapiens; identical to SEQ ID NO: 82

SEQ ID NO: 410 - DNA, 2066 bp, Homo sapiens; identical to SEQ ID NO: 81

SEQ ID NO: 411 - DNA, 482 bp, Homo sapiens; identical to SEQ ID NO: 42

SEQ ID NO: 412 - DNA, 2235 bp, Homo sapiens; identical to SEQ ID NO: 72

SEQ ID NO: 413 - DNA, 836 bp, Homo sapiens; identical to SEQ ID NO: 28

SEQ ID NO: 414 - DNA, 489 bp, Homo sapiens; identical to SEQ ID NO: 92

SEQ ID NO: 415 - DNA, 707 bp, Homo sapiens; identical to SEQ ID NO: 31

SEQ ID NO: 416 - DNA, 553 bp, Homo sapiens; identical to SEQ ID NO: 15
  misc_feature (1)..(553): n = a, t, g, or c

SEQ ID NO: 417 - DNA, 867 bp, Homo sapiens; identical to SEQ ID NO: 188
  misc_feature (1)..(867): n = a, t, g, or c

SEQ ID NO: 418 - DNA, 278 bp, Homo sapiens; identical to SEQ ID NO: 68

SEQ ID NO: 419 - DNA, 931 bp, Homo sapiens; identical to SEQ ID NO: 285

SEQ ID NO: 420 - DNA, 2384 bp, Homo sapiens; identical to SEQ ID NO: 3

SEQ ID NO: 421 - DNA, 452 bp, Homo sapiens; identical to SEQ ID NO: 62

SEQ ID NO: 422 - DNA, 463 bp, Homo sapiens; identical to SEQ ID NO: 53

SEQ ID NO: 423 - DNA, 1546 bp, Homo sapiens; identical to SEQ ID NO: 27

SEQ ID NO: 424 - DNA, 2253 bp, Homo sapiens; identical to SEQ ID NO: 61

SEQ ID NO: 425 - DNA, 1686 bp, Homo sapiens; identical to SEQ ID NO: 2

SEQ ID NO: 426 - DNA, 822 bp, Homo sapiens; identical to SEQ ID NO: 279
  misc_feature (1)..(822): n = a, t, g, or c

SEQ ID NO: 427 - DNA, 572 bp, Homo sapiens; identical to SEQ ID NO: 205
  misc_feature (1)..(572): n = a, t, g, or c

SEQ ID NO: 428 - DNA, 828 bp, Homo sapiens; identical to SEQ ID NO: 91
  misc_feature (1)..(828): n = a, t, g, or c

SEQ ID NO: 429 - DNA, 3492 bp, Homo sapiens; identical to SEQ ID NO: 23

SEQ ID NO: 430 - DNA, 2813 bp, Homo sapiens; identical to SEQ ID NO: 60

SEQ ID NO: 431 - DNA, 539 bp, Homo sapiens; identical to SEQ ID NO: 30
  misc_feature (1)..(539): n = a, t, g, or c

SEQ ID NO: 432 - DNA, 773 bp, Homo sapiens; identical to SEQ ID NO: 39

SEQ ID NO: 433 - DNA, 783 bp, Homo sapiens; identical to SEQ ID NO: 59

SEQ ID NO: 434 - DNA, 762 bp, Homo sapiens; identical to SEQ ID NO: 79
  misc_feature (1)..(762): n = a, t, g, or c

SEQ ID NO: 435 - DNA, 522 bp, Homo sapiens; identical to SEQ ID NO: 58

SEQ ID NO: 436 - DNA, 560 bp, Homo sapiens; identical to SEQ ID NO: 86

SEQ ID NO: 437 - DNA, 1633 bp, Homo sapiens; identical to SEQ ID NO: 85

SEQ ID NO: 438 - DNA, 2828 bp, Homo sapiens; identical to SEQ ID NO: 84

SEQ ID NO: 439 - DNA, 578 bp, Homo sapiens; identical to SEQ ID NO: 90

SEQ ID NO: 440 - DNA, 2828 bp, Homo sapiens; identical to SEQ ID NO: 84

SEQ ID NO: 441 - DNA, 1836 bp, Homo sapiens; identical to SEQ ID NO: 7

SEQ ID NO: 442 - DNA, 503 bp, Homo sapiens
  misc_feature (1)..(503): n = a, t, g, or c
acgggagcgccgcaccgncggcactggaggagcgcggcncttccgagccgacccccggctgcagcggccctgggtccgggcggtgttcgcggctttggcgacggcggtggagctccttcgtgggccccntgaggacgcctggatgggcacctcacccctaagtatctagaaatgatggaattagatataggagatgccacccaagtttatgtagcgttcttggtttacctggacctcatggaaagcaaaagctggcatgaagtaaactgtgtaggattaccagaactccagctcatctgccttgttggtactgagatagaaggggaggggttacagactgtggtgcctacccccatcactgcttccctcagccataacaggataagggagatcttgaaggcatctcgaaagttgcaaggtgatncagatttgccgatgtcttttactttggccatagtggagtctgattctacaatagtctattataaacttactgatggatt

SEQ ID NO: 443 - DNA, 337 bp, Homo sapiens; identical to SEQ ID NO: 104

SEQ ID NO: 444 - DNA, 2150 bp, Homo sapiens; identical to SEQ ID NO: 52

SEQ ID NO: 445 - DNA, 4181 bp, Homo sapiens
  misc_feature (1)..(4181): n = a, t, g, or c
ggtggatgcgtttgggttgtagctaggctttttcttttctttctcttttaaaacacatctagacaaggaaaaaacaagcctcggatctgatttttcactcctcgttcttgtgcttggttcttactgtgtttgtgtattttaaaggcgagaagacgaggggaacaaaaccagctggatccatccatcaccgtgggtggttttaatttttcgttttttctcgttatttttttttaaacaaccactcttcacaatgaacaaactgtatatcggaaacctcagcgagaacgccgccccctcggacctagaaagtatcttcaaggacgccaagatcccggtgtcgggacccttcctggtgaagactggctacgcgttcgtggactgcccggacgagagctgggccctcaaggccatcgaggcgctttcaggtaaaatagaactgcacgggaaacccatagaagttgagcactcggtcccaaaaaggcaaaggattcggaaacttcagatacgaaatatcccgcctcatttacagtgggaggtgctggatagtttactagtccagtatggagtggtggagagctgtgagcaagtgaacactgactcggaaactgcagttgtaaatgtaacctattccagtaaggaccaagctagacaagcactagacaaactgaatggatttcagttagagaatttcaccttgaaagtagcctatatccctgatgaaatggccgcccagcaaaaccccttgcagcagccccgaggtcgccgggggcttgggcagaggggctcctcaaggcaggggtctccaggatccgtatccaagcagaaaccatgtgatttgcctctgcgcctgctggttcccacccaatttgttggagccatcataggaaaagaaggtgccaccattcggaacatcaccaaacagacccagtctaaaatcgatgtccaccgtaaagaaaatgcgggggctgctgagaagtcgattactatcctctctactcctgaaggcacctctgcggcttgtaagtctattctggagattatgcataaggaagctcaagatataaaattcacagaagagatccccttgaagattttagctcataataactttgttggacgtcttattggtaaagaaggaagaaatcttaaaaaaattgagcaagacacagacactaaaatcacgatatctccattgcaggaattgacgctgtataatccagaacgcactattacagttaaaggcaatgttgagacatgtgccaaagctgaggaggagatcatgaagaaaatcagggagtcttatgaaaatgatattgcttctatgaatcttcaagcacatttaattcctggattaaatctgaacgccttgggtctgttcccacccacttcagggatgccacctcccacctcagggcccccttcagccatgactcctccctacccgcagtttgagcaatcagaaacggagactgttcatcagtttatcccagctctatcagtcggtgccatcatcggcaagcagggccagcacatcaagcagctttctcgctttgctggagcttcaattaagattgctccagcggaagcaccagatgctaaagtgaggatggtgattatcactggaccaccagaggctcagttcaaggctcagggaagaatttatggaaaaattaaagaagaaaactttgttagtcctaaagaagaggtgaaacttgaagctcatatcagagtgccatcctttgctgctggcagagttattggaaaaggaggcaaaacggtgaatgaacttcagaatttgtcaagtgcagaagttgttgtccctcgtgaccagacacctgatgagaatgaccaagtggttgtcaaaataactggtcacttctatgcttgccaggttgcccagagaaaaattcaggaaattctgactcaggtaaagcagcaccaacaacagaaggctctgcaaagtggaccacctcagtcaagacggaagtaaaggctcaggaaacagcccaccacagaggcagatgccaaaccaaagacagattgcttaaccaacagatgggcgctgaccccctatccagaatcacatgcacaagtttttacctagccagttgtttctgaggaccaggcaacttttgaactcctgtctctgtgagaatgtatactttatgctctctgaaatgtatgacacccagctttaaaacaaacaaacaaacaaacaaaaaaagggtgggggagggagggaaagagaagagctctgcacttccctttgttgtagtctcacagtataacagatattctaattcttcttaatattcccccataatgccagaaattggcttaatgatgctttcactaaattcatcaaatagattgctcctaaatccaattgttaaaattggatcagaataattatcacaggaacttaaatgttaagccattagcatagaaaaactgttctcagttttatttttacctaacactaacatgagtaacctaagggaagtgctgaatggtgttggcaggggtattaaacgtgcatttttactcaactacctcaggtattcagtaatacaatgaaaagcaaaattgttccttttttttgaaaattttatatactttataatgatagaagtccaaccgttttttaaaaaataaatttaaaatttaacagcaatcagctaacaggcaaattaagatttttacttctggctggtgacagtaaagctggaaaattaatttcagggttttttgaggcttttgacacagttattagttaaatcaaatgttcaaaaatacggagcagtgcctagtatctggagagcagcactaccatttattctttcatttatagttgggaaagtttttgacggtactaacaaagtggtcgcaggagattttggaacggctggtttaaatggcttcaggagacttcagttttttgtttagctacatgattgaatgcataataaatgctttgtgcttctgactatcaatacctaaagaaagtgcatcagtgaagagatgcaagactttcaactgactggcaaaaagcaagctttagcttgtcttataggatgcttagtttgccactacacttcagaccaatgggacagtcatagatggtgtgacagtgtttaaacgcaacaaaaggctacatttccatggggccagcactgtcatgagcctcactaagctattttgaagatttttaagcactgataaattaaaaaaaaaaaaaaaaaattagactccaccttaagtagtaaagtataacaggatttctgtatactgtgcaatcagttctttgaaaaaaaagtcaaaagatagagaatacaagaaaagttttngggatataatttgaatgactgtgaaaacatatgacctttgataacgaactcatttgctcactccttgacagcaaagcccagtacgtacaattgtgttgggtgtgggtggtctccaaggccacgctgctctctgaattgattttttgagttttggnttgnaagatgatcacagncatgttacactgatcttnaaggacatatnttataaccctttaaaaaaaaaatcccctgcctcattcttatttcgagatgaatttcgatacagactagatgtctttctgaagatcaattagacattntgaaaatgatttaaagtgttttccttaatgttctctgaaaacaagtttcttttgtagttttaaccaaaaaagtgccctttttgtcactggtttctcctagcattcatgatttttttttcacacaatgaattaaaattgctaaaatcatggactggctttctggttggatttcaggtaagatgtgtttaaggccagagcttttctcagtatttgatttttttccccaatatttgattttttaaaaatatacacataggagctgcatttaaaacctgctggtttaaattctgtcanatttcacttctagccttttagtatggcnaatcanaatttacttttacttaagcatttgtaatttggagtatctggtactagctaagaaataattcnataattgagttttgtactcnccaaanatgggtcattcctcatgnataatgtncccccaatgcagcttcattttccaganaccttgacgcaggataaattttttcatcatttaggtccccaaaaaaaaaaaaaaaaaaaaaaaaaa

SEQ ID NO: 446 - DNA, 1209 bp, Homo sapiens
ggcacgaggctccttcgggaaacccagccccgtcaccgggctccgagcggctcgcaggcgagcgacagcggcctcagccccggcagcgcccagcggcggctgcggaaagcggagggagtccgacgcgggcgcgggcggggagcgtgcgtccgttcgcacaggcagcgggaggaggggcggcgcgaaccatggccggggacagcgagcagaccctgcagaaccaccagcagcccaacggcggcgagcccttccttataggcgtcagcgggggaacagctagcggcaagtcttccgtgtgtgctaagatcgtgcagctcctggggcagaatgaggtggactatcgccagaagcaggtggtcatcctgagccaggatagcttctaccgtgtccttacctcggagcagaaggccaaagccctgaagggccagttcaactttgaccacccggatgcctttgacaatgaactcattctcaaaacactcaaagaaatcactgaagggaaaacagtccagatccccgtgtatgactttgtctcccattcccggaaggaggagacagttactgtctatcccgcagacgtggtgctctttgaagggatcctggccttctactcccaggaggtacgagacctgttccagatgaagctttttgtggatacagatgcggacacccggctctcacgcagagtattaagggacatcagcgagagaggcagggatcttgagcagattttatctcagtacattacgttcgtcaagcctgcctttgaggaattctgcttgccaacaaagaagtatgctgatgtgatcatccctagaggtgcagataatctggtggccatcaacctcatcgtgcagcacatccaggacatcctgaatggagggccctccaaacggcagaccaatggctgtctcaacggctacaccccttcacgcaagaggcaggcatcggagtccagcagcaggccgcattgacccgtctccatcggaccccagcccctatctccaagagacagaggaggggtcaggaggcactgctcatctgtacatactgtttcctatgacattactgtatttaagaaaacaccatggagatgaaatgcctttgattttttttttctttttgtactttggaacgacaaaatgaaacagaacttgaccctgagcttaaataacaaaactgtgccaactaaaaaaaaaaaaaaaaaaa

SEQ ID NO: 447 - DNA, 2538 bp, Homo sapiens
gctggagcatcccgctctggtgccgctgcagccggcagagatggttgagctcatgttcccgctgttgctcctccttctgcccttccttctgtatatggctgcgccccaaatcaggaaaatgctgtccagtggggtgtgtacatcaactgttcagcttcctgggaaagtagttgtggtcacaggagctaatacaggtatcgggaaggagacagccaaagagctggctcagagaggagctcgagtatatttagcttgccgggatgtggaaaagggggaattggtggccaaagagatccagaccacgacagggaaccagcaggtgttggtgcggaaactggacctgtctgatactaagtctattcgagcttttgctaagggcttcttagctgaggaaaagcacctccacgttttgatcaacaatgcaggagtgatgatgtgtccgtactcgaagacagcagatggctttgagatgcacataggagtcaaccacttgggtcacttcctcctaacccatctgctgctagagaaactaaaggaatcagccccatcaaggatagtaaatgtgtcttccctcgcacatcacctgggaaggatccacttccataacctgcagggcgagaaattctacaatgcaggcctggcctactgtcacagcaagctagccaacatcctcttcacccaggaactggcccggagactaaaaggctctggcgttacgacgtattctgtacaccctggcacagtccaatctgaactggttcggcactcatctttcatgagatggatgtggtggcttttctcctttttcatcaagactcctcagcagggagcccagaccagcctgcactgtgccttaacagaaggtcttgagattctaagtgggaatcatttcagtgactgtcatgtggcatgggtgtctgtccaagctcgtaatgagactatagcaaggcggctgtgggacgtcagttgtgacctgctgggcctcccaatagactaacaggcagtgccagttggacccaagagaagactgcagcagactacacagtacttcttgtcaaaatgattctccttcaaggttttcaaaacctttagcacaaagagagcaaaaccttccagccttgcctgcttggtgtccagttaaaactcagtgtactgccagattcgtctaaatgtctgtcatgtccagatttactttgcttctgttactgccagagttactagagatatcataataggataagaagaccctcatatgacctgcacagctcattttccttctgaaagaaactactacctaggagaatctaagctatagcagggatgatttatgcaaatttgaactagcttctttgttcacaattcagttcctcccaaccaaccagtcttcacttcaagagggccacactgcaacctcagcttaacatgaataacaaagactggctcaggagcagggcttgcccaggcatggtggatcaccggaggtcagtagttcaagaccagcctggccaacatggtgaaaccccacctctactaaaaattgtgtatatctttgtgtgtcttcctgtttatgtgtgccaagggagtattttcacaaagttcaaaacagccacaataatcagagatggagcaaaccagtgccatccagtctttatgcaaatgaaatgctgcaaagggaagcagattctgtatatgttggtaactacccaccaagagcacatgggtagcagggaagaagtaaaaaaagagaaggagaatactggaagataatgcacaaaatgaagggactagttaaggattaactagccctttaaggattaactagttaaggattaatagcaaaagatattaaatatgctaacatagctatggaggaattgagggcaagcacccaggactgatgaggtcttaacaaaaaccagtgtggcaaaaaaaaaaaaaaaaaaaaaaaaaaaaaatcctaaaaacaaacaaacaaaaaaaacaattcttcattcagaaaaattatcttagggactgatattggtaattatggtcaatttaataatattttggggcatttccttacattgtcttgacaagattaaaatgtctgtgccaaaattttgtattttatttggagacttcttatcaaaagtaatgctgccaaaggaagtctaaggaattagtagtgttcccatcacttgtttggagtgtgctattctaaaagattttgatttcctggaatgacaattatattttaactttggtgggggaaagagttataggaccacagtcttcacttctgatacttgtaaattaatcttttattgcacttgttttgaccattaagctatatgtttagaaatggtcattttacggaaaaattagaaaaattctgataatagtgcagaataaatgaattaatgttttacttaatttatattgaactgtcaatgacaaataaaaattctttttgattattttttgttttcatttaccagaataaaaactaagaattaaaagtttgattacagtcaaaaaaaaaaaaaaaaaaaaaaa

SEQ ID NO: 448 - DNA, 518 bp, Homo sapiens
  misc_feature (1)..(518): n = a, t, g, or c
tctgatgttctgctcagcatgttctgggtgcttctcatctgcatcattcctttcagatgctgtagcttcttcctcctctttctgcctccttttctttttcttttttttggggggcttgctctctgactgcagttgaggggccccagggtcctggcctttgagacgagccaggaaggcctgctcctgggcctctaggcgagcaagcttggccttcattgtgatcccaagacgggcagccctgaaacagacagggtccaagtaaaagcgagggtatcgggggaaatgggcctagtccttaagcctgcagggaaagttggtggagggtaggagtggggagctgcctatcttcaggcaatagatgggtaggtaataggaatcatttccctggggtaaaaagaaccaagaggtggcacaggccatggtcnaaggtgggggagaaaagggagctcaaggagctgaccactacttacttgtgtgctgttcgcccctcacaggcttggagcagcatctcatcagtc

SEQ ID NO: 449 - DNA, 756 bp, Homo sapiens
  misc_feature (1)..(756): n = a, t, g, or c
attttgtttattttttatttcaggcttacaaaagttgttcatatcaaaggcacccacccactgatgtgccaggtccagaatgcaccgccttgtcactcctggaagaatgatgccatctagtggaggagttgccagttcttcttctccatcttcatttatccagtaaagaaaaagattcatagttcccacttcagtgatctgatggtcctctccatagagccacaggacctgctgacacccattatctactgcttcacattgggcaaaaagagatgagccgtaattccctcccatcttgcagtccccagttccacctttccaggctcttacatacttgggattggcccacagggacactggattaaaggttccacttgaaaaataaggtcccactgggctcaagagtacaaagagcagggctttggtaggcttcttgactccaagagaaggctcagttccaatgaatgtaggacgaatatacagactagcagatgttgaatatgggacccattcttgatccaatttcacaagctgttgaatacactctaagagctcttctttgtcaaataccggcagagttgccctcacagcagagcgatacattctatccatgttgaggttggctganacagtcgaattntattatctactcctcgaaatgccttcatccttcaaataatccactggatagtgcanagctgatgagnccaggtgcaattgcaggttctgaagaagcttgattataggtttctccca

SEQ ID NO: 450 - DNA, 4856 bp, Homo sapiens
cggactcacgcagctccagcccatcttgctgacctaattcagaaaagaagtgctacagctctgtgcctgtcatctttgcagtgtagcattttcaggtgatctaggaaacagttatttttatgagcaaataagagaaacaggaatcatgatggggatatatttaacagacccagtactggataaaacttaaagccagtttctattcaacatagtgaaaaggtcaccttgcctggctgagaaaagcagcaaaatatcagctttgttggtttcagttaacctcttagcccgggctaatctcttttccttgatgttcaaaccaatttgggatatctaactctaaagagagacacactgtactcatggtagatgacaaggaaaagaacatgaaatgtctcaccttcttcttgatgcttccagagacggtaaagaacaggtccaagaaaagctcaaagaaagcaaataccagcagcagcagtagcaacagcagcaagttgccaccagtttgttatgaaataattaccttgaagactaaaaagaagaagatggctgctgatatattcccccgtaaaaagccagccaactccagcagcaccagcgtccagcagtaccaccagcagaatctcagtaacaacaaccttatcccggccccaaactggcagggtctttatcccaccattagagagagaaatgcgatgatgttcaataatgatttgatggcagatgtacattttgtggttgggccaccaggtgggactcaacggttgccaggacacaaatatgttttagctgttgggagctctgtgttccatgcgatgttttacggagaacttgcagaggacaaagatgaaatccgtataccagatgtcgaacctgctgcttttctcgctatgctgaaatatatctattgtgatgaaattgacttggctgctgacacagtgctggccacactttatgctgccaaaaagtacattgtccctcaccttgccagagcctgtgttaatttcctggagaccagcctgagtgccaagaatgcctgtgtgctcctctcccagagctgcctgttcgaggagccagacctgacccagcgttgctgggaggtgattgatgcccaggctgagttagctctcaagtctgagggattctgcgatattgacttccagacactagaaagtattctccgtagggaaactctgaatgccaaagaaattgtggtttttgaggcagctctcaactgggctgaagtagaatgccaacgacaagatctggcgttgagcattgaaaataaacgcaaggttctaggaaaggcactttacttgatccgcatacccacaatggccctcgatgattttgcaaatggtgctgcacagtccggggtattaactctcaatgagaccaacgacatcttcctctggtatactgcagccaaaaagcctgagcttcagtttgtgagtaaagcccgtaagggccttgtcccccagcgctgtcaccgtttccagtcgtgtgcctatcgaagcaaccaatggcgctatcgtggtcgctgtgacagcatccagtttgcagttgataaaagagtgttcattgctggctttgggctgtatggctccagctgtggttctgcagaatacagtgccaagattgaacttaagcggcagggcgttgtcctggggcagaacttgagcaagtacttctcagatgggtccagcaatacctttcccgtatggtttgaatacccagtgcagatcgagccagacaccttctacacagccagtgtgatactggatggcaatgaactcagctactttggacaagaaggcatgacagaagttcagtgtggcaaagtgactgtccagtttcagtgctcctcagatagcaccaatggcactggggtacagggagggcagatccctgaacttatattctatgcttgaaaactcacttcctgaagcagcttgagctccaaagtgcacatctggttccaacttgcctgatgcttagctcatctgcaaatatgtgatcagtgccggtaatttgtaatgaatgaagcggtaggcaggttctaatttcttttaaccttttaattatgtacaggcaaaaatgcagcattccgcttttaactatctgcttaaaagagctaacgttcttattaaggctttgtggtttttagagttgcatctatgaacctggggagattatgtgctttcccaagcgttccaccaccctctcagttttgtccctctgaagataattttggatcaccttgaatttccttttggacgttatttgatgaacagaaataaattgataacaagagttatttttaaacagaactcctcttaccccccaaaacagataaacctcagtgtacaattttgaaagaagttttgccttgtaatgagtaataatttagaaagtagacagtggttgtgtttggctctcgttttattccttttacatttgttgcttctgggatttaaaaaattactaaattcataagatagttaggtattaaacacttcagaatatcaatgtaaaattggaaaataaggaactgggggcatttgtttaggccatgacttctacaagcagatttcttttcttttagtttagaagacaaaaaatttcaatacagatacttcttttagaagtaaatttttagattttattgtcagtagaaaaaagttaaactcctactaatttaaactaagacagtttaaaaaggaagcctgaaaaagactcatactacaaataatttaattgatggcatataagaatatgcagtttgaaaaagccaaactcttctctccacttagcttttgatccccactgtttgcttatttgtataagtcatactgtgtagaatttctattttctttttccccattaaaagaggaccaaacaattctttatacaaatggagtagcaactagttttgtagcactacatttaatgtaatgagatacctttgttcatttttttaaatttgaaatatactttacctgatccactttgattgtatactatattctttgttaattttaattttgtcctgttcctagactgctagaatctggcccctggccatcttaaagtgccaacatatgcctgcagggtttataaaaaatggcctggagtgacacattttattatacctaatattcactgcatcagtatcacatctagctcccttacttgtccacagataatgtaaacaaaggagggaaaaacttattaaattctccttcgctgctggcttgtactggtttagtgcctgtgtccctggcagtgtccagtgtgttcacttccagttgaagtatccatgtgtttctgggcagcttttctgctcagtgtgatcctgagatggcttccccgccgccacccagagtgtggtccttggccgcctcctgctcctgctctgcaagcctgaaactggcttgtctggagccaggagttagtcctggggtgtgtgtgtgcctgcgcacccatgcgcatgcaagtgtgtttgccagctcaggagctgtctcctctctacctggctagtaagaggtgggacagtaatggtcctcctgctggccccagcaaggcccatgagtgactgccctgacgtattcactgtgcctctgggccacttcttcccctgtagatgtgggcttgttgccttcagccggcttccctgagggaggagaacactggattattggaaatgttttaatcactcttgccattacctacatctattagcatagatgatgaaaagctgttactggtgattatagatgagtatttccaggacaacattctaaaagtacaattatttcttattggggagattacaggtagtttggcaaagcattgaagtacaaaggtacattttcaattaaaaagcacacttctacaaaagatttggtttttaaattatggttacacatttcagtaactcatagctgctgtgcaaattggtagaccttataagaaggcacttgtttgtaagccagagaagaaactttaattgcatcctatcagattgttgaggtgggtgtgatagtcttcaggtgcagtgcgttcattcactaacgctcactgtcagtgcccatgtttgctagctgcctccatgtgactagtgagctgctggtgaaagtcgtgtgaaatcctgtacactgtgtatagaacaatgtaattttatgttaattgttattactttaaaacatatctaccatctgattggctggtaccgagagctgtgggtaaaatttgaaaattgtatttagaataagaaattttacattttaaaccctattgtcctttatgcattttcaatgaaatggaatgaaggctaatatgcttgctttatttacttttgtaatcttggattttgtagcttttaaaactagaaaccattgttctaacaaagcaggcaactttattctataaacacaactttattaagcagaatacactgtagatgcttttccccaacgtatctggctggcagtctttgtcgttgttcattctggggataaaggggaactaggctagcagttctaatgtgacattctttaagcatatcttaaaatagtatttaagtaaatggtctaatttctacataattattgcactgaacttttttgtttattaaggtgtttaaataagctcagctaattcaagacactgtagtcacttgtgcatcagtgtgcttgaatttagtagcttacagcattatttatgaaggaaaaaatacataaatatgaagtacctcatgttgaatgttattgtactgtatttttaatgtaacagtgcagatcttgttagacacatgaatgtgtataatcatgttaaatgcaaataaaactagttcatag

SEQ ID NO: 451 - DNA, 507 bp, Homo sapiens
tttttttttttagaaaaggtggaaatggccttttatttaaatatgaggaaaaaattagaattaagtacagtaagattatttttaaaaaagcagacaagttagaacaaacattttattattaaaataaacttttgtataaaagcattacagatcaaaagctgtatttacacttatcgattcaaggtccaattatgcatcaaacattgaatggcacagcaatggtttacatatgcaagtaaattggacatacaaacacttagattccacctctaccaaataccttgattaatgcaaagcggagggggaatactgacacaggaaacctgcccagaaactagatgtcaggttaacaaactgctaaaagttacatctccaaaaaggcacttatcattgttataaaagtgcttaaaatctaaacttgaaccttgtgcctggtttataaatttacaagaaactgcaaagaaccacagactagtttttaatatcaagtttccatacaaaattgtc

SEQ ID NO: 452 - DNA, 2454 bp, Homo sapiens
ccaggaggcacgctggttttccggggccgctccatcgcgccttcctcctgcgcctcgcttctccggtccagccgccatcttcctttccgcacaggggccgccgagcggggccatgcagccaacgctgcttctcagcctcctgggagccgtggggctggcggctgtcaattccatgccagtggataacaggaaccacaatgaaggaatggtgactcgctgcatcattgaggtcctctcaaatgccttgtcgaagtccagcgctccacccatcacccctgagtgccgccaagtcctgaagacgagtagaaaagacgtcaaagacaaagagacaactgaaaatgaaaacacaaagtttgaagtaagattgttaagagacccagctgatgcctcggaagcccacgagtcctccagcaggggagaggcaggagccccaggggaggaggacatccaaggcccaacaaaggcagacacagagaaatgggcagagggaggcgggcacagccgagagcgagcggatgagccccagtggagcctctatccctccgacagccaagtctctgaagaagtgaagacacgccattctgagaagagccagagagaggatgaggaggaggaggagggagagaactatcaaaaaggggagcgaggggaagatagcagtgaagagaaacaccttgaagagccaggagagacacaaaacgcttttctcaatgaaagaaagcaggcttcagctataaaaaaagaggagttagtggccagatcggaaacacatgctgccgggcattctcaggagaagacacatagccgagagaagagtagccaggagagtggagaggaggcagggagccaggagaatcacccccaggagtctaaaggccaaccccgaagccaggaagaatctgaggaaggtgaggaagatgccacctctgaggtggacaaacgacgcacgaggcccagacaccaccacgggaggagcaggcccgacaggtcctctcaaggagggagtcttccctctgaggaaaagggacacccccaggaggaatctgaggagtcaaacgtcagcatggccagtttaggggaaaagagggaccaccattcaacccactacagggcttcagaggaagaacctgaatatggagaagaaataaagggttatccaggcgtccaggcccctgaggacctggagtgggagcgctataggggcagaggaagtgaagaatacagggctccaagacctcagagtgaggagagttgggatgaggaggacaagagaaactaccccagcttagagcttgataagatggcacatggatatggtgaagaaagtgaggaagagaggggccttgagccgggaaagggacgccatcacagaggcaggggaggggagccacgtgcctatttcatgtctgacaccagagaagagaaaaggttcttgggtgaaggacaccaccgtgtccaagaaaaccagatggacaaggcaaggaggcatccacaaggtgcgtggaaagagctggacagaaattatctcaactacggtgaggaaggagccccagggaagtggcagcagcagggagacctgcaggacactaaagaaaacagggaggaagctaggtttcaagataaacaatatagctcccatcacacagctgaaaagaggaagagattaggggaactgttcaacccatactacgaccctctccagtggaagagcagccattttgaaagaagagacaacatgaatgacaattttctcgagggtgaggaggaaaatgagctgaccttgaacgagaagaatttcttcccagaatacaactatgactggtgggagaaaaagcccttctctgaggatgtgaactgggggtatgagaagagaaacctcgccagggtccccaagctggacctgaaaaggcaatatgacagggtggcccaactggaccagctccttcactacaggaagaagtcagctgagtttccagacttctatgattctgaggagccggtgagcacccaccaggaggcagaaaatgaaaaggacagggctgaccagacagtcctgacagaggacgagaaaaaagaactcgaaaacttggctgcaatggatttggaactacagaagatagctgagaaattcagccaaaggggctgactgtcattggagcggtgggcactgttaagaagcagccatcacatgatctgtttttcaccacttcactgaaagacaccatttatatacccaagggcagaaagtagaacttactattcattaaatgtttgacacaattggaattgtctttaatttctgtcagaatgctattgaaaatgtgaattgcatgacttgtagcatattcttttctgcaaaatagacatattaacatgcttatgacaatgactgtgctactgtctttggaaaaatgtttgtctcagttggaaataataaaagattcacctgagacc

SEQ ID NO: 453 - DNA, 775 bp, Homo sapiens
  misc_feature (1)..(775): n = a, t, g, or c
tttttttttttaaattaaataaacttttattttggaatgatactagatttacagagaagttgcagagatagtacaaagagttcctgtataccctttacccagcctaccccaaggtcaacatcttacatcaccatggtacatttgtcaaaaccaagggactgaaattggtatattaactaaaattcagacttttttcagatttccaattttcccactaatgtcctgtttttgttccaagacccaatccaggatgccacattgcactgaagacactctcccttttcaattctattactggtcacctcagtcaactttcccggggaaagagaatgcatgggaaaagctcttgtccttattattgaactggaaaaactgaagcctaaaagtggcgagtgaccaagttcccttagagggcagtgagaacaaggcctgccttactctgttccctttccccagggactcttggttttcagaagcccctctggaatgtcctacctggcctaaccccataccagtagtgcagacaaggaggcactcctactacagtgggtccagcccatggagagactcacttnctgccccaacacctcttcccctagaccctgagggccaggacaatgtcttagtgcctttcaacttggcagagtgaggccccatgagacagagagaaagggggaagaaggaaatacctttatcccaataatacccattccaaagtaantggggatggtgaaaaagggccccaagctctttggggtcccctcatcaagaaatg

SEQ ID NO: 454 - DNA, 586 bp, Homo sapiens
tttatttcataattctcctttattaggcacaggtaaacatacatactcatggtatccaaaacctagagtatggacctgggattgtggaccccaagtgtccccagaagagtcccacctgggactttccaggtggccacaggacagaccctgcctaatcctgtccctcaaccttggtgctcaggtcagaagccccatggttgacaggcctggaccctcattccagaacagtcttgagttagacaagaactagcctcatagtttggattcttatctctggcccaaatcccaggcttaggcctggaaggagaatctcttaatcaagaggacagagatgctgggaacacagttcccagagtgagctgggcttgggtcctgagttgcaggggagaggcctagagcctttggcacagggatacctccctttctctgaaaaggtacaagatacaaaggcagctggtttgtttgtgaaagggattgtccttggacagaggtgcctgagcaccagcatcagtggaggccgacactggtacaaagtgtacccagtgtagacagtgacctatggtcatggaaaagtgttgtcagctca

SEQ ID NO: 455 - DNA, 669 bp, Homo sapiens
atgaagccgcccagttcaatacaaacaagtgagtttgactcatcagatgaagagcctattgaagatgaacagactccaattcatatatcacggctatctttgtcacgagtgaattgttctcagtttctcggtttatgtgctcttccaggttgtaaatttaaagatgttagaagaaatgtccaaaaagatacagaagaactaaagagctgtggtatacaagacatatttgttttctacaccagaggggaactgtcaaaatatagagtcccaaaccttctggatctctaccagcaatgtggaattatcacccatcatcatccaatcgcagatggagggactcctgacatagccagctgctgtgaaataatggaagagcttacaacctgccttaaaaattaccgaaaaaccttaatacactgctatggaggacttgggagatcttgtcttgtagctgcttgtctcctactatacctgtctgacacaatatcaccagagcaagccatagacagcctgcgagacctaagaggatccggggcaatacagaccatcaagcaatacaattatcttcatgagtttcgggacaaattagctgcacatctatcatcaagagattcacaatcaagatctgtatcaagataaaggaattcaaatagcatatatatgaccatg

SEQ ID NO: 456 - DNA, 468 bp, Homo sapiens
  misc_feature (1)..(468): n = a, t, g, or c
cgcattagtgacactgcaagtgctcaacagccacatgtcgtanctggcttccacactggacagcacagataaaaaacattccaatcatttcagaaagttctactggatagttttgaattagattatggtaggaagaatgatattaagacaagtatctgtcatattctgcaagttaaccattaaaattcctcccattgtcaaggaagcataatatgtaaaagcaggttaagtacagatcattgcagctgcaaactgagtaagggtaatgagtaaaaactttgaataccaacagcatcctcaatttatgatttggtcagtcctatggcactgacctaagttaaaaaacctacacggaaggcaaggctttcctttttttttaggcngggtctcgctcttgttgggcngggtgggagtgcattgggccggccntcggctcactgcaacctcccattcccgggttcaacnttt

SEQ ID NO: 457 - DNA, 518 bp, Homo sapiens
aaaataatagtgtttttattttgtttctgcaatgttactgtatcagtgagatattctttgctgtatgtttagataatcagaatacttgagtttaaaattcaggtatatcattatctaatacacacaaacaccatggagataagagtatgagggcattgttctcccataattagatcatattatattttgaagactctagtatgtaatgaagtcataaaatacagtagtcccaggtggcagaagttttaaattgttatcatcgagtgtacagaaaaatactatgaataatattaaataagtaaattagcaaacacataaaactaaataaagagatgaagtttttaaaaatataattttagaattatttggggaaatcaagatgaaaacaacataggtaactcagaaaaatgtctgccttagcgtactctatatgacatataaaaaaatttgagaaaaaggacagaaaagttttagcaacaaattttaaagcaaagaatagattattacatcgaaaaagc

SEQ ID NO: 458 - DNA, 319 bp, Homo sapiens
  misc_feature (1)..(319): n = a, t, g, or c
ctcgtgcaancttttttaaaatttatgcnttttatatgaacatttgaattgcaaatacatttttctgagaaaaagagtcctcttgttcttcgttgtctggtttgtcacatcttttataagttggtacttgaaatcattatacatataatttaactatacttggttaaaagaataatgaaagttatccntaaggccaaaactatttttncttgcttgttttaaatatattttnatgaaagctttcgctctgtgtgtaatttttcagacctgttacaaatggttaagagtttaggatgctgtgggcagattccaaagtgcc

SEQ ID NO: 459 - DNA, 678 bp, Homo sapiens
accggacgccgagagcggtttgtctccgtctctggagttgtaggcgagaggtgatcatgtccggtcgcgggaaacagggcggcaaagtgcgagcaaaggccaaatcccgctcctcccgcgcgggcctgcagttcccggtgggccgagtgcacagactgctgcgcaaagggaactacgcggagcgagtgggcgccggggcgccggtgtacctggcggcggtgttggagtaccttacggcggagatcctggagctggctggcaacgccgcgcgtgacaacaagaagaccaggataattccccgccacctgcagctcgccatccgcaacgacgaggagttaaacaagctgctgggcaaagtgaccatcgctcagggcggcgtcctgcccaacatccaggccgtgctgctgcccaagaagacggagagtcagaagacgaagagcaaatgaccctgacgccgccctcagggagctggctcccccagcaaaggcccttttcatggtcgtcccgcaatgcttttgaatgtgctggatgtcatggagggccggtgacatctagcggggaggtgggcggcgagggtcccggcgggagccaataaagttggtgaaaatcaaaaaaaaaaaaaaaaaaaaaaaaaaaaaaaaaaaaaaaaaaaaaaaaaaaaaaaaaaaaaacctcggg

SEQ ID NO: 460 - DNA, 528 bp, Homo sapiens
  misc_feature (1)..(528): n = a, t, g, or c
gtatttcagtagagacggggtttcaccatgttggccgggatggncttgatctcctcaccttgtgatccacccaccttggcctcccaaagtgctgggattacaggcgtgagccaccgtgcccggccgcaacttatatttttaaaataggcttttagatcagttttaagggttattttatagttaactagcagaaaatgtggattaaaattacagtaccatactcaattaaaaatcatgcgctacataatttaagttctcctgttaacttctgtttgggttgaaccccgaagtacaatagtgtagattctcattgtgacctcacctgcccctttaggcattttgcaaaatttacaccttttacaatttgaaaggcagggtgccagtgccttcatgtatttcatttaatctgaaatttttatacgtattagacatagaactgcntaaatatgaatgtccaaattaaagtaaaatttncatctngggtncccatcattcaagttntgaaacaaaagtntaaaaanccccatg

SEQ ID NO: 461 - DNA, 3323 bp, Homo sapiens
tgcttcataaaatttacctaagcaagtggtcttgcttgcctcaaatccaagcagtcttgaacacttggaggcaattaatgagtatatcttagtcaaaagaattgttggagctttttattaaagctgcagtttcagttctgcttttggggaattgtgctatgaaagcagctgccaaaataagctcatttattttcttcaatcccactcagtgctcagtcactatattctgtttcctttttttttttcaagttgcatatttggtttccccttatgattgggaaagatgaattttcagcagaaaacagtgtttgttcactttcaaagagtgatagtttctaaaacatttagagcaataaatattcatcagaggtaccaagtaagccagcagaagagttaagggttagagaaatcccttatttcatgtcttgactctaaaatgatcaaagtacttttccttgtaatgtggatttcttcttatgcggatatgcaaaaacttcagttatacgtagtaatgctagcaggtaattttagtggacattttataacaactgtcactttgttttgccacatgtagagtttgttcagctattttccagatatctccccacaaaaggaggcaaagggtaccagcttttcaatgagcattacctattacttggcaaagatgatgaagactctattaatagttcatttgataaatgttgacataaccaacaatagagattaggaagttagttttaagaaatcaatagcatatagacattaccctcatggagtttgtattctactacttgaactgattgtagctataaaagcatagttagatagctgaatagttagatcataagcaaagaaggccagaacacatctcttatcaagaaatcaatgaatagtttatctcatttttaaagcaactttatccttctttaattccttcctttcttctagtgcaaaactacttaataaggttggtgtttaggttagtgttcacaccattcctcatctggtgtgaattaccttctctttctttactatttactaccaacctagtacatgtgttgactgaattcttttcaaacaatgttgagttatcatggtgcacctaataaattaacaccacagattacagcatccttgctgattttctcagcaaagccagattagatggaaataaacaaagaaaatgatcctagagtgaatttttctagaaaatatctattatgaaccatgctgtttaaagtattagcttgaaggtgatggatccagctattcagaaaataactttcatataaccatgattttgcacagtatgaggtcttaaatgtgtggaaagagataaattttttatcattaccacaaaccccttttaaagattcaaaggtggaagaaagtgatttattttttctcttcagcatacatatataaaagacttgtcagatgtttaatttggggaggttgataatgaaacatatcaacagagtatagtagttatagtagtgtttgtgggtaaataatttcctggggtcagacatatataaacatatttgcttcaaaatgataaaggcatgaaatcagtcttaaaaattgaaatgggggtgatgggggagaaaaagaagaacaaatttgaagtgccctttcaaatctgctggatacaagtattgaagttttaagtcatcttattctgtctgaaagtgtatttttcattctacaatagacccaatcaacaagacgtataacttgagttgcatgatgttcagtttatgtaatctactgttgggatggtaagaattgatgtaggctgtggtgtaagaatgaattaaaatatagtttcactggcttttctctacatatccactatcacaatggctaggtttcctgttgctcactgttggattctggagaaaaatttaatgaaagatgatatcagaggaagaataagtggaggtagagaagaaaggagtgatagaggaggggaaaaaaacaaaacatatttttgtgttatccaaaggagctttttccttattctgtcaagcattgagatcttcttcagctttcaatgtagttgctaaatacaaataatgctactaggtagtgactaaatatagcaaacacttcatcagatattagaattaggtcacactattgaggttataatctgaaggttgtgttacatagaaaccactttagattattatcaacttgggctaggctttattttataatagcatagtaagtaatatctattgtgtcatttcttcaaccattttattctaagatccatgaagcttcttgaggccaaataaaataataagtttagacaagaagtagattgtgactttttttcccttagagatactatttactatctcctatcctgataggtggaaggtttactgaattggaaattggttgactattagtttttaactaaaatgtgcaataacacattgcagtttcctcaaactagtttcctatgatcattaaactcattctcagggttaagaaaggaatgtaaatttctgcctcaatttgtacttcatcaataagtttttgaagagtgcagatttttagtcaggtcttaaaaataaactcacaaatctggatgcatttctaaattctgcaaatgtttcctggggtgacttaacaaggaataatcccacaatatacctagctacctaatacatggagctggggctcaacccactgtttttaaggatttgcgcttacttgtggctgaggaaaaataagtagttcgaggaagtagtttttaaatgtgagcttatagatagaaacagaatatcaacttaattatgaaattgttagaacctgttctcttgtatctgaatctgattgcaattactattgtactgatagactccagccattgcaagtctcagatatcttagctgtgtagtgattcttgaaattctttttaagaaaaattgagtagaaagaaataaaccctttgtaaatgaggcttggcttttgtgaaagatcatccgcaggctatgttaaaaggattttagctcactaaaagtgtaataatggaaatgtggaaaatatcgtaggtaaaggaaactacctcatgctctgaaggttttgtagaagcacaattaaacatctaaaatggctttgttacaccagagccatctggtgtgaagaactctatatttgtatgttgagagggcatggaataattgtattttgctggcaatagacacattctttattatttgcagattcctcatcaaatctgtaattatgcacagtttctgttatcaataaaacaaaagaatcctgttaaaaaaaaaaaaaaaaaaaaa

SEQ ID NO: 462 - DNA, 535 bp, Homo sapiens
ttttttttttttttttgctttctgccttctaaagtgcaacagtatatatcttgtagaactgtgggaggagagaagataatttttctaccttactccatattcttacttcaaactattttgaatagaggttcactgagccattgctgatagactgtgcatagctactagctgtcacactattgtaggttttttggagagattcatagggaagtgaatgtaaccaggaataaaggctctcactttagctctgggactatgcagtggatcttgggaacaaaataagatatctaatctattttccccattctggctagattttggttgttgtgatgctcctacttcctgtataggtttttgggatcatggtgcaggctagtaataggattcagaattgcttcccttttatatcgaccatgtaagggattctaaaggagggtaaatctcaaagtgctctgaaatcatccctctaaaatctgtcctgtggtgtgctaagatgtctgttgcctttttatgttaagctaaggaacttgaatgc

SEQ ID NO: 463 - DNA, 531 bp, Homo sapiens
actttgttttagggttcatatttattttccaattacttttattgatcttacagaatagtgtcttggtctctctactgcattcaacaacaccaaaaatctacaacgctggtgtcaacagcaataattactaaaaattgagcaagcaatttatgactatccgcaattatggaaaatggattcaaaaggcatctgctgcaataacaatagtatttatgtgtgttaagacacaaaaagccaacataactttagtacctcaggcatttttctaattgtgatatttatacaaattttggaaatcgatgagtacactgaccagtcaccgataatcatgaaaaagaaaatacacataagtgcctatttagctaatactgtgtttaactctagcttgacattgtgtgatactgtaatccctttcaaagcactggaaatcactcacatttgcctcaagcttttttttaaaacagaagaataatctgatgaagatgcccttatttcagaaactgaggtcattactatctttgcttgaaacat

SEQ ID NO: 464 - DNA, 435 bp, Homo sapiens
ttcatgatttgtataatgtaatttatgctttagtgagttattttccatatagtaaaatgcctttatttaaaaaagaagaggtacagtacattataattccaaggaaattttcgtattttaaaaatgccaatttttggctaaaaactcaaaagatttcatttaatacttgaataacaaggaaattcacaattaaggctgaaatactgttcatattattgtgtatttctaagcatgttattttaagcttgtgtattttaaaccatggttacagaattgtataggaatatattgaaggcataaccttatatttattggaattttggtttaattgtttagaatttcaaaatagtattgggatgtgaaacaggatgattatcactctgataaaaacaagactgaactgagtccttcactgtatttttctaaagaactcac

SEQ ID NO: 465 - DNA, 653 bp, Homo sapiens
  misc_feature (1)..(653): n = a, t, g, or c
tttttcagggcataaaatattttattcacattttaactccactggagtcacagatgaagtatcatcttctattccaagaatgaagtcttcaggtactgtctcaggtgctatctgagctaactggtcatcataagaacgtagggtccataatttctctaattcatagatttctctggtttctggaagcatcaaatgaatcaccatgctgccaaaatccacgcacagccagtcatcagtgtccttcccttctatcttaacatgagggtcacgtttacatttcaggtgtttgtacattttcacaacgtagaaggccatggcatgtaagtgtcgggtagaagttccactaacaatcacaaagtaatctgtatatctcatttctggaggaacctggatcacacaaatgtctcttgcatttttgcctcagaagtgaaaccatcatatcgatgtcaaacttgngaccagtatgatctgccgcgtccgatctgggcgtccctcgttgaccgtcccctccgcccgctcctccagcccaggctcgctgtgcaggccgcggaccaagtnngggngtctgggcagcccggcagaacgctgctcctacgggaaagccgctgcacggccagcagcccgagccccnggctcgctnncacccgcgaccc

SEQ ID NO: 466 - DNA, 1411 bp, Homo sapiens
gaaaagtggtgattcgcatctaggtggcggcagtcgagaaggctcgtttaaagaaacaataacattaaagtggtgtacaccaaggacaaataacattgaattacactattgtactggagcttatcggatttcacctgtagatgtaaatagtagaccttcctcctgccttactaattttcttctaaatggtcgttctgttttattggaacaaccacgaaagtcaggttctaaagtcattagtcatatgcttagtagccatggaggagagatttttttgcacgtccttagcagttctcgatccattctagaagatccaccttcaattagtgaaggatgtggaggaagagttacagactaccggattacagtagttccattagccagtgttattgtgaaagaatctctgacagaagaagatgtgttaaactgtcaaaaaaacaatatacaacttagttgatatggaaagaaaaaatgatcctctacctatttccacagttggtacaagaggaaagggccctaaaagagatgaacaataccgtatcatgtggaatgaattagaaacccttgtcagagcccatatcaacaactcagagaaacatcaaagagtcttggaatgtctgatggcatgcaggagccaacccccagaagaggaagaaccgaaagaaaccgaggaagaaagagggaagacaaagaggacaagtcagagaaagcagtgaaagattatgaacaggaaagtcttggcagactcaagagatttaaagggattcttagagcgtggaaaagaagaattggctgaagctgagattataaaagattcgcctgttcccccagaccctccaaccaaaaaaccccttgttgaaatggatgaacctccacaagtggaaaaatcaaaagggccagtgtcgttattatccttgtggagaatagaatcaatactgccaattccagaaaacatcaggaatttgctggacgtttgaactctgttaataacagagctgaactatatcaacatcttaaagaggaaaatgggatggagacaacagaaaatggaaaagccagccggcagtgaagagtgacttgaagaactaaatttagcatattgcaaaaatattttgtgcggaattcgatataagtacttttacagcaagatggtatagttatgttgcctggactggtttttacatttttaaaatatttcagctgtcatttttgtactaattataaaattggcacataattcaaaaatatacatttgagatgatttgtcctcccaaattatacaagtttattttatggtataaagtgttctctctggaaatgtttttaaaaaaattcttaggcttctctttgcgaaataaaactattaaaatatttgaaatgcaaaaaaaaaaaaaaaaaaaaaaaaaaaaaa

SEQ ID NO: 467 - DNA, 581 bp, Homo sapiens
  misc_feature (1)..(581): n = a, t, g, or c
cactttaaatagacactttattagatccacaggcgataaaatcccagagctactgttaggcacgtaaatatagaccctgctaaatatttaatattatcaagcttgtgtgactcaagcatggttttgaggccagcaacctcagtttcgatcttcctgtctgtctgggtaagggcccgatcttgctgggcatgcaatgccactatttctgttctcaattccagcagcttcttttcgttcaatgaatacaattcttttactctgctcttttctaggttgaagtctaatttggtatctgttcggactttgatcacttcatccattacttgttgttttaactgatgtagttcgagttttattttctcattttctgctctgagggctgaaaattcactcttctccaaaataatcatatcctttttcacattcgcaatatgagacattacttgctgaaaagtgatttcctgctgcatcttggtgaccatatctttgtagacgatgtccatgttggcctccaggatcttgaccaatgcagacacaatgatttctgctttgtgagtagcaaacccattgtnctccagtaa

SEQ ID NO: 468 - DNA, 583 bp, Homo sapiens
gccatacagatattttaatgctcacaagttatttttcgacggagatcaacattacattaacttgaatttagtttcattattaaattatgaaacaagatacagataaatcttataagcagagttctgattacttaacacagtgaaattgcaattccaagttacagagacattcacataaagatattcttgagctactaaataatggctaaatactgatgacaataagaattaatactttccacttatgacatttgtcaataacaactctgattaggtaaaaaataattaacatgatggtcatattataattctaaataaatacattattatgtttgccacaggagtatgtgtgtatgcgtgtgtgggtatatgtgcatgtgtgtgtattcagatggtactgaactcaagttggcttttaaaaaggaagagatcaggcatattactgtgcacttatgttatcagagtgatttatgtaatgctatgatgtcaaataaaacctagagtctagtcaattagagtaagcagagtacttgaatctgttgagtctgtttggtcatggaaaatgagttacctctaacaaact

SEQ ID NO: 469 - DNA, 528 bp, Homo sapiens
gcggccgccgagatttccgaccttgtcccaggcagggcggtagcgttccggatcagtccttgcctccgtgcccccacgcacaggcagctccaggagcagcggccagcaacccttctggggacaccttactgtagtccggcaggacagccgatcagagccgctctagggggtggtcggagtgcccatttcggctggaatcccaactcggctccttgctctgtgaccttggggtagttagttgacttctctgaacctcgggttcctcatcggtgtaatgagcaaaacataaacaatctttttctcacagttgaggttatccacaggaagcatttaggagaactggctcaggtagacatcagtaactattagctggaattcggttaccactattgcattccttcctagcactgccaggggcctgggaattccctctcccaggtatttccatatcctgtcaggtattcccccacctattggaatagctctgcctacatggttctaataggaccaagagattggcgtcaagtc

SEQ ID NO: 470 - DNA, 497 bp, Homo sapiens
ggagacagagtcttgcactgtcgcccaggctggagtgcaatggcacaatctcggctcactgcaacctccgcctgaagggagattttcaaagcaacattgcctctatcataggtagtcttcaatgtaatactggcaccaacaagagaaccgagctaaattaaaactaccctcaaaatgtcatcacagctgatgtgcacagcaggaaggacgatgtcacaaaatgcacagatctgttcctattgcacattccacctttcccacgtactgctggcagcccagaataaccaaaatctttttagatgtctgtcttaaagagagctataatatgcaaacatacacacacacacacacacacacacccacacacacacacaacctcaaacctggtttataaaagagctttgtggatcagagtacaccctcacttggtccaagaatctaattgtcaacattaggcaaatagacccaatgaatgtaaccaggaagagaattaactg

SEQ ID NO: 471 - DNA, 663 bp, Homo sapiens
  misc_feature (1)..(663): n = a, t, g, or c
tttgctacttatatttccacaaaaaggtcctgaattggcccgggctcttctaacaaatgcctttctcttctcttccaggaactggcttggaatgagaccagcgcttcctccctcttttacatggctagcctgccaccaatttggatcttctctatttacaatctgaagaatttctcctttggaaaacttcaatcctgcttctttgcaaggtattaggttgtcattgtatggattataatcaaaatgacacttcacaaatacctgttgaggagtaatggtatctctataacttggtaagatttttagggtgacacttccactaatatttttcagtaattcttgtaattcctttggattatttccaacctcatggccattgacttctttaattatatctcccacatgaagtagaccttgtcgatctatcattcccccatggaggattcgggcaattaccagatcattattttcaaccctaaatgtcacacccagtggttccccagctcttttgtgaataccaagaatacgaatggcatctactggtaataactgattattgatagaagaattattcatttctgcgcttgatggaggtgaaatcatacactntgatgccacaatatcatgggcctccaacagtgacttgaagtgaggttctttgat

SEQ ID NO: 472 - DNA, 556 bp, Homo sapiens
  misc_feature (1)..(556): n = a, t, g, or c
tttttttttcagaaattcataccacaccagacagatgtgttttattaaaaaagaaagaaaaccctttaatcagaaagtctgattaaattcaatagtaactcaaactcttaaaaaatttctggaaaagtcaacaggatacatacatcacagaaaagcaggcagctgctgacagttctttggtggaaaagtaagttgcgtacttacccaagctgcccaaatgattatcaagccaagtttggtttttcaaaaataggttttaagatacaccaaagaaactatacaatacaaaaatttaacaatgaagttaaagtatatagcaaaagccaaatatgacaacacacatgtataatgtagaaaagaatcctttcagtcctagaaaactaaaatggggagaacttactgaagggtaacatacataaaatgagtactaatagcaaggaataatcctaaacattttcccaataaactgactaagcctcaaaaggacagcttaggaaaatgattaacatgcagtttttctttnttcctagccaattcagttctacttagataaatc

SEQ ID NO: 473 - DNA, 809 bp, Homo sapiens
tttttttttttttttttttttttttttggctctagagggggtagagggggtgctatagggagttgcttggaggttggcggccggggctgaaggtagcaaaccgagcgatcatgtcgcacaaacaaatttactattcggacaaatacgacgacgaggagtttgagtatcgacatgtcatgctgcccaaggacatagccaagctggtccctaaaacccatctgatgtctgaatctgaatggaggaatcttggcgttcagcagagtcagggatgggtccattatatgatccatgaaccagaacctcacatcttgctgttccggcgcccactacccaagaaaccaaagaaatgaagctggcaagctacttttcagcctcaagctttacacagctgtccttacttcctaacatctttctgataacattattatgttgccttctagtttctcactttgatatttaaaagatgttcaatacactgtatgaatgtgctggtaactgctttgcttcttgagtagagccacccacaccatagcccagccagaatgagtgctctgtggacccacagcctaagctgagtgtgaccccaaagccccgatgtgccccggaatccagaccaccttggcagatggagggaagcctccgaatttgaggaacatggctgtaacagggatcaggaaaactggcgttttggggtttatccccccggggttgaagtgagggggactgcggatttaaggttcaggtaacggaaaactttcacattattcaagaaacctggtcaggttaaaagccctgataaagagggagtt

SEQ ID NO: 474 - DNA, 521 bp, Homo sapiens; identical to SEQ ID NO: 54

SEQ ID NO: 475 - DNA, 630 bp, Homo sapiens
  misc_feature (1)..(630): n = a, t, g, or c
ttttttttttttttttttttttttttaaaagggagccaactttattctccttaaaccacaaaatagagtctttggttggacaaacatcactagttacagtctcgccgaggtctcggctgggggggggcagttagttagtcacaggccaaaactcctggggggtctctttaaaatgctaacacccagggttaaaagacttggggcaagggtggtgctggagctggcagggcccccaccccaagtctgggggaggtgcctgctcctttaggagggcacagggcccaggccacggcgcccaggccttacggggcgggggttgctgcacagtgccacatttttagggcccacagcgccgggtgagggcctgcccaaaagcaccagagccacttntccatcctcctcctgcgggccagggctgggagatggttccagggacctcaactcctcagcaaagtccggtgactggatgtcatanacaggtctggaagaggcagggccgcaaaggccctgtagtcaaacttctttccagacaagggcaggcgtccccggggagggtgctgtctgggggccgaggtctttcacaggggtgggcgacggggtgggcgcaggggaaggggcttngncaatcct

SEQ ID NO: 476 - DNA, 591 bp, Homo sapiens
tttataataaaactcttttaattcaaaatagagtctaatttaaagaaaatgtcattatgcccagttgactagatagggttttgtcatttaaattaaattattcacctgaaatatgggaaatatataatagagaaaattcaatctcaagggtactttgcaaattatctagttaatttgcatcatgaatcaaattcttagcttctaaagggcagacacagtctttaattgcttttagataggcacttaagaaatgcttttgatgaggagaaaaccccaaagattgtgaatcactctattaactccagggaagaatgagactctcaacaaagtagctttccagaactacccttccagtgccaagaaagtaaaactatttgcaagctctttctggtaataagaatgagggaactcaaaacaaaaaatgctctattatgcaattaaaaagtaaacttaggtaaatcagtttctttttatcaatctctgtcaatttgaattaacggtatttttcaataccatttcaagaatagttaccatactagaactagacaatgttgcaattatctcatatcttacctattcattatcacacta

SEQ ID NO: 477 - DNA, 731 bp, Homo sapiens
acagcttttttttttttttttttaggagcctttaaacaggagctttattctctaatgtgcgtccagcaagttccttacacaatcaaggaaatggtttctctttcaggcatcgactcttttatcaaaagaaaatccatcctgctcagtcccacccaccctgggcagaagctgccctgagcaacgctcttggcctaaagctaaaggataatgggagaggggtgggcacataccactgcacccctacaatgcccagatgccccaggcctgagtcagccatgagaaggcgcagcacagagcagtcacccacacacctacacctcccctcacagctccagagccagcctgggaggacgtggagggctggcgaatggggcgtgggcagggtctgccagtcaaggcctgtgctcagcgtccatgacatccaagtacttggcttcaatgattcggggcagcaggatatagcggatggggatcatggcgatcatgatgaggggaaagatcatcttcatgtaaggcatggagctcatgccgaatgcacacagcagcagcagctgaagcacctgcatgcccgtgaagtagtggatcttcctctggggcaccctccggatgtagtgtgtcagggggtacacagtctgctctctgatcagcagggccactcgctggacgagctagttgccatctgaggatgtgagcgcgatgtatacgaagaggccatataacacagcctttgg

SEQ ID NO: 478 - DNA, 562 bp, Homo sapiens
  misc_feature (1)..(562): n = a, t, g, or c
tttgatagcaaagtgnncctaataaacatcaatttttttactgtttaaagttcaaaaattttctatgactagccaataaattgctgcaacttttacagctaacgctggtgttcctgaaatttgaaacatagtacttttcaagaactgtggaaaagcttgattacaacaaaaataacaggcagagtgttctattgttcctgttttctcctgaaacttaaactctgaatagcaacagattgcagcaaatgtagctcagcatattctgaaaaatacagccccaggaaatagctagttaaaatgtggaccacatttcaattccacctttccagtggagattatcagtagactcaaagagatccaagggttggatgaataaccatagttgaaaatgctgacacaaattattatttggcaataataaactgaggtgaaatgatgccaagtaactgatgtagtggaagtatgttctggtctgactagaatacagcaataaaagttgagaggttaataagggcaaaagaaccttcagataaatggagaatgagaaagaattgatgattca

SEQ ID NO: 479 - DNA, 2046 bp, Homo sapiens
aattcggcacgagctcacgttgcattgaagacgaaacctcggggaggtcaggcgctgtctttccttccctccctgctcggcggctccaccacagttgcaacctgcagaggcccggagaacacaaccctcccgagaagcccaggtccagagccaaacccgtcactgaccccccagcccaggcgcccagccactccccaccgctaccatggccgaagacgcagacatgcgcaatgagctggaggagatgcagcgaagggctgaccagttggctgatgagtcgctggaaagcacccgtcgtatgctgcaactggttgaagagagtaaagatgctggtatcaggactttggttatgttggatgaacaaggagaacaactggaacgcattgaggaagggatggaccaaatcaataaggacatgaaagaagcagaaaagaatttgacggacctaggaaaattctgcgggctttgtgtgtgtccctgtaacaagcttaaatcaagtgatgcttacaaaaaagcctggggcaataatcaggacggagtggtggccagccagcctgctcgtgtagtggacgaacgggagcagatggccatcagtggcggcttcatccgcagggtaacaaatgatgcccgagaaaatgaaatggatgaaaacctagagcaggtgagcggcatcatcgggaacctccgtcacatggccctggatatgggcaatgagatcgatacacagaatcgccagatcgacaggatcatggagaaggctgattccaacaaaaccagaattgatgaggccaaccaacgtgcaacaaagatgctgggaagtggttaagtgtgcccacccgtgttctcctccaaatgctgtcgggcaagatagctccttcatgcttttctcatggtattatctagtaggtctgcacacataacacacatcagtccacccccattgtgaatgttgtcctgtgtcatctgtcagcttcccaacaatactttgtgtcttttgttctctcttggtctctttctttccaaaggttgtacatagtggtcatttggtggctctaactccttgatgtcttgagtttcatttttcattttctctcctcggtggcatttgctgaataacaacaatttaggaatgctcaatgtgctgttgattctttcaatccacagtattgttcttgtaaaactgtgacattccacagagttactgccacggtcctttgagtgtcaggctctgaatctctcaaaatgtgccgtctttggttcctcatggctgttatctgtctttatgatttcatgattagacaatgtggaattacataacaggcattgcactaaaagtgatgtgatttatgcatttatgcatgagaactaaatagatttttagattcctacttaaacaaaaactttccatgacagtagcatactgatgagacaacacacacacacacaaaacaacagcaacaacaacagaacaacaacaaagcatgctcagtattgagacactgtcaagattaagttataccagcaaaagtgcagtagtgtcacttttttcctgtcaatatatagagacttctaaatcataatcatccttttttaaaaaaaagaattttaaaaaagatggatttgacacactcaccatttaatcatttccagcaaaatatatgtttggctgaaattatgtcaaatggatgtaatatagggtttgtttgctgcttttgatggctacgttttggagagagcaatcttgctgtgaaacagtgtggatgtaaattttataaggctgactcttactaaccaccatttcccctgtggtttgttatcagtacaattctttgttgcttaatctagagctatgcacaccaaattgctgagatgtttagtagctgataaagaaacctcttaaaaaaataatataaatgaatgaaatataaactgtgagataaatatcattatagcatgtaatattaaattcctcctgtctcctctgtcagtttgtgaagtgattgacattttgtagctagtttaaaattattaaaaattatagactcc

SEQ ID NO: 480 - DNA, 976 bp, Homo sapiens
  misc_feature (1)..(976): n = a, t, g, or c
aagggtggcaagacgtgacagcaacatctgcttacaagaaggacatctgaaaccttatcccaggctggacagaaggcctcagctgctttttcgtctgttggctcagtcatcaccaaaaagctggaagatgtaaaaaactccccaacttttaaatcatttgaagaaaaggtcgaaaacttaaagtctaaagtagggggaaccaagcctgctggtggtgatttttgagaagtcttgaattcggctgcaaatgctagtgccaccaccacggagcctcttccagaaaagacacaggagagcctgtgagattcctaccttgttctgctacccactgccagatgctgcaagcgaggtccaagcacatcttgtcaacatgcattgccatgaatttctaccagatgtgcttttatttagctttacattttcctttggccaataggttggggggtaaacccaaataggaaatataactcttcacctcatatctctgtgggaaacacccctttaggtgtacatttatgttcctttatttaggaaacaccattataaaaacacttatagtaaatggggacattcactataatgatctaagaagctacagatgtcatagtgttttcctgctttacaaaattgctccagatctggaatgcagttgaccttgtcttctataatatttccttttnttccccctctttgaatctctgtatatttgattcttaactaaaatggttctcttaatatctgaatcgtggtaattacacgtcgggtgaatttccttactccaggaaagactactaggtacagaaatattctggataggttggtgggttacggacattttggtgacgacccagatgagtaccgtgggcccatctatcggtggaggacaaagtacacccaggacgaagggcctattatggcgggaagacatcgttggtccaatacaatacggatatttaaaaggacacgggggaaccga

SEQ ID NO: 481 - DNA, 529 bp, Homo sapiens
  misc_feature (1)..(529): n = a, t, g, or c
ggctggagtgcagtgtcgtgatcttggctcaactgcaacctccacctctcaggtttaagtgattctcatgcctcagcctcctaagtagctgggactacaggcacgcaccaccacgctcggctaatttttgtatttttagtagagacaggttttcaccatgttggccaggctggtttcaaactcctggcctcaagtgatccacctgcctcggcctcccaaagtgctgggattacaggcatgagccaccatgcctgggcctttcatccatctttaaacaaattcaatgaccatctaggagacagatgtgaccaaagtgttacaaatttctatgcattttctatgaattgctctgtgcagttcacacatggggtttcattcaccccgcaggctngtgaacttcctnttcccgtagggntgcaggtactcaggntttcagcaactacggngacccaaaaggtctaaaggggggcttgtttaaanttagggccctctcaaaaaattggttnccatcttttaaccanaccggttt

SEQ ID NO: 482 - DNA, 399 bp, Homo sapiens
ttttttttttttaagggaaacaagaaataaatgtatttaattttaaaacagccataataaaagtagacttgataaataaaacccaaaaccacttctttgaaaagaccgttaaaaaaacctctgagaagtcaagcaaaagagaaagaaaaggcacaaattttaaaatgttagatttagaaaaatggcataataaccaacgtgcagaagctgcttcaaatcaaggagacgggaggccagcttcattccatgggaggccagcttcattccagtaggttctgtttcacctggatgaaatggaagattttcttggaatgtataaattggcttagcaggaggcagaaaaccctttcacagctggggagtggagcctgggcctgcgcctctccgcgccagagccgg

SEQ ID NO: 483 - DNA, 1520 bp, Homo sapiens
cggcggaggtgtctaccccgccggtgatggcgttgaacgccactggcttcccggccttccgtccgctgcctccgtccgattctgcgtctgcttgctgaggaggcggattaggggggcgcggagtctcttcccttgagtgcataggtcccggttggtagagggtttgagtccgcatcgccacagctgaaggctgcgagggactaagagcagaatatatctttagaaatgagttgcacaattgagaaggcacttgccgacgctaaagctcttgttgaaagattaagagatcatgacgatgcagcagaatctctgattgagcaaaccacagctctcaacaagcgagtagaagccatgaaacagtatcaggaagaaattcaagaacttaatgaagtcgcgagacatcgccacgtccacgttagttatgggatccagcagaaaacagacaaatcagagagttgcaacaagaaaacaaagattacgtacatctctggagaacatcagtcggccttggaacttataatgagcaagtaccgagaacaaatgtttagattgctaatggctagcaaaaaagatgatccgggtataataatgaagttaaaagagcagcactccaaggaactgcaagcacatgttgaccagataactgaaatggcagcagtaatgaggaaagccattgaaattgacgagcaacagggttgcaaggaacaagaacgaatatttcaacttgaacaagaaaacaaaggcttgagagagatccttcaaataactcgagaatcatttttgaacctaaggaaagatgatgcgtcggaaagtacttctttgtcagcattagtgaccaacagtgatttgagtctgaggaagagctgaagagtttctgagtctgtgagcttcttacatggctccaaatggtcaaataagtgaatgaatgaatggacagaaaattcaatcctttatttttttctctgtaaatatgtacagtgcacgggctatgagatagcaacaaaaaatgcatagttaatggtcatagactttattccaaaacataattggaaaatagaaactgagccattgccaaatggtaaagaaatgaaaagttttcacagtgactactgaatataccaagagcttttggcagtactgctggctttctgggtgattaattaggtaaacttgaatattcccagtaaatgtttgagaatgcataaaattataccaatttaaaaatataaatttttgccactgttttgtgaacggaggatttgtacgctaaatttcatccttatttggcgtcaaagttgatgcaaagtttatgtaccatgagacttctagtgattgcctactttcacatttatttaaatttttgtgaaagaaaatacagttttaaaggctataggaatgtgttatatgtccttaaacagataatttaattttagcaatttatcataactgatacttagctaacaattgccataacttgtttaagtgtaaagaaataccatttcaggaatgaaaaaaaaaaa

SEQ ID NO: 484 - DNA, 574 bp, Homo sapiens
  misc_feature (1)..(574): n = a, t, g, or c
nttttttttttttaggataacattatttatttatttccttttatcaaagaaggtaattgatacacaacaggtgacttggttttaggcccaaaggtagcagcagcaacattaataatggaaataattgaatagttagttatgtatgttaatgccagtcaccagcaggctatttcaaggtcagaagtaatgactccatacatattatttatttctataactacatttaaatcattaccaggaactgtttgttttgtagtgaaccttgagtatgtgctgttaatataccaaattgggtgaaaaaataagggattcctttcaaaagttaagagaagtaagtgtgtaagaaattattttgcttatnaaatgttcggtaaatggcattctcttgtcagtaaaatggagaaataagctaaaaataantggctaagtcctattaagttagaggattaagtgtattatatttgccatcaaattgggtgctcattaatttatgatcggtagtatagcnaaattgctatgtttgtatcanatggagcanaaagttgctgaactgtctccgttgaaccgaagtgga

SEQ ID NO: 485 - DNA, 592 bp, Homo sapiens
  misc_feature (1)..(592): n = a, t, g, or c
ttttgtgaataagttatacttttatttttcagaaacaaaaatgacaagtggcaacttgcctttgtaaaagattaaagagtatcagagtaataagctatctctcatagagacagaagcccgagaaacactattatacagctttcaaaggaagtcctattaaataaatctcacaataatatactttaactcaacaaaacaaaaaccacaaaaaattatacagaactcataaaatggtatatgaatgaaaaagagaaatctttaaatccatacactagaagttctctattaaaatcaaggaggctcaaatcctaaaacagaaagaagaaatacgttaaaacacaatattttttaagagtccaatgaggttattgcagatgtacattttaacatttcatttgctcaatggtatttttttctcattcttggagcacttctggtataatggtagagagattacntggaatgataatgccagatactgggccctccccaatggggcccttcagggntttaaggttcccaatccgggatcnggggatncccccccnaatgggttacnttatagggctcccaggatggggatcccccctta

SEQ ID NO: 486 - DNA, 369 bp, Homo sapiens
gcggccgccaatgacagtgtcatggaggtattccacaaggacgtgcttgccagcattaaggaactgcctgatgtagtcctcatggctggagctctcactgcagatataggcgacctccacctcttggctggaaagagcatcctccaaagaaatccgctggactccatcaatgctcccgagctcccttctcgacacgaagccaatcaggttcaggaacgctgaggaagggtgtggattccgcaagtccctcatccgcacggagccggctcggcaacaccaaccaccaccacgccaaacttcctctcgggctctgtattcatcttggtctcttccttcggtcactgacgcgggcacccgtctccgtgcagc

SEQ ID NO: 487 - DNA, 703 bp, Homo sapiens
  misc_feature (1)..(703): n = a, t, g, or c
ttttttttttgcaagaacagtattcataggataaacaaatagcaaatgtacagccttggcttccccaaactccacagtctcagtgcagaaagatcatcttccagcagtcagctcagaccagggtcaaaggatgtgacatcaacagtttctggtttcagaacaggttctactactgtcaaatgaccccccatacttcctcaaaggctgtggtaagttttgcacaggtgagggcagcagaaagggggtagttactgatggacaccatcttctctgtatactccacactgaccttcaaaagcttctgggggccatcagctgctcgaacactgagcttgtgtaaaagttgaaccatgaggccacaaaagcggtcaaaggttctgggaattcgggtctggggattcacttcaatcagaacattcttctgtgtatggatataaacctgtagcaagccagctcggttcaggggactatccatcagcatcagcaaactctggtgggtgatatctggccgcgcttccccagggtcccgtccattcttcaaacatatagacttgtgcttgtcacagntgagtagctcatatgtcttccctaccttgactgtcttcagactggccccttncagcaccacaataagcctacnggctncgatcttgntttctgcccctagtcggggccgtttgggtggcagagcatcccaatcctg

SEQ ID NO: 488 - DNA, 3345 bp, Homo sapiens
gaattccgtctcgaccactgaatggaagaaaaggacttttaaccaccattttgtgacttacagaaaggaatttgaataaagaaaactatgatacttcaggcccatcttcactccctgtgtcttcttatgctttatttggcaactggatatggccaagaggggaagtttagtggacccctgaaacccatgacattttctatttatgaaggccaagaaccgagtcaaattatattccagtttaaggccaatcctcctgctgtgacttttgaactaactggggagacagacaacatatttgtgatagaacgggagggacttctgtattacaacagagccttggacagggaaacaagatctactcacaatctccaggttgcagccctggacgctaatggaattatagtggagggtccagtccctatcaccatagaagtgaaggacatcaacgacaatcgacccacgtttctccagtcaaagtacgaaggctcagtaaggcagaactctcgcccaggaaagcccttcttgtatgtcaatgccacagacctggatgatccggccactcccaatggccagctttattaccagattgtcatccagcttcccatgatcaacaatgtcatgtactttcagatcaacaacaaaacgggagccatctctcttacccgagagggatctcaggaattgaatcctgctaagaatccttcctataatctggtgatctcagtgaaggacatgggaggccagagtgagaattccttcagtgataccacatctgtggatatcatagtgacagagaatatttggaaagcaccaaaacctgtggagatggtggaaaactcaactgatcctcaccccatcaaaatcactcaggtgcggtggaatgatcccggtgcacaatattccttagttgacaaagagaagctgccaagattcccattttcaattgaccaggaaggagatatttacgtgactcagcccttggaccgagaagaaaaggatgcatatgttttttatgcagttgcaaaggatgagtacggaaaaccactttcatatccgctggaaattcatgtaaaagttaaagatattaatgataatccacctacatgtccgtcaccagtaaccgtatttgaggtccaggagaatgaacgactgggtaacagtatcgggacccttactgcacatgacagggatgaagaaaatactgccaacagttttctaaactacaggattgtggagcaaactcccaaacttcccatggatggactcttcctaatccaaacctatgctggaatgttacagttagctaaacagtccttgaagaagcaagatactcctcagtacaacttaacgatagaggtgtctgacaaagatttcaagaccctttgttttgtgcaaatcaacgttattgatatcaatgatcagatccccatctttgaaaaatcagattatggaaacctgactcttgctgaagacacaaacattgggtccaccatcttaaccatccaggccactgatgctgatgagccatttactgggagttctaaaattctgtatcatatcataaagggagacagtgagggacgcctgggggttgacacagatccccataccaacaccggatatgtcataattaaaaagcctcttgattttgaaacagcagctgtttccaacattgtgttcaaagcagaaaatcctgagcctctagtgtttggtgtgaagtacaatgcaagttcttttgccaagttcacgcttattgtgacagatgtgaatgaagcacctcaattttcccaacacgtattccaagcgaaagtcagtgaggatgtagctataggcactaaagtgggcaatgtgactgccaaggatccagaaggtctggacataagctattcactgaggggagacacaagaggttggcttaaaattgaccacgtgactggtgagatctttagtgtggctccattggacagagaagccggaagtccatatcgggtacaagtggtggccacagaagtaggggggtcttccttaagctctgtgtcagagttccacctgatccttatggatgtgaatgacaaccctcccaggctagccaaggactacacgggcttgttcttctgccatcccctcagtgcacctggaagtctcattttcgaggctactgatgatgatcagcacttatttcggggtccccattttacattttccctcggcagtggaagcttacaaaacgactgggaagtttccaaaatcaatggtactcatgcccgactgtctaccaggcacacagactttgaggagagggcgtatgtcgtcttgatccgcatcaatgatgggggtcggccacccttggaaggcattgtttctttaccagttacattctgcagttgtgtggaaggaagttgtttccggccagcaggtcaccagactgggatacccactgtgggcatggcagttggtatactgctgaccacccttctggtgattggtataattttagcagttgtgtttatccgcataaagaaggataaaggcaaagataatgttgaaagtgctcaagcatctgaagtcaaacctctgagaagctgaatttgaaaaggaatgtttgaatttatatagcaagtgctatttcagcaacaaccatctcatcctattacttttcatctaacgtgcattataattttttaaacagatattccctcttgtcctttaatatttgctaaatatttcttttttgaggtggagtcttgctctgtcgcccaggctggagtacagtggtgtgatcccagctcactgcaacctccgcctcctgggttcacatgattctcctgcctcagcttcctaagtagctgggtttacaggcacccaccaccatgcccagctaatttttgtatttttaatagagacggggtttcgccatttggccaggctggtcttgaactcctgacgtcaagtgatctgcctgccttggtctcccaatacaggcatgaaccactgcacccacctacttagatatttcatgtgctatagacattagagagatttttcatttttccatgacatttttcctctctgcaaatggcttagctacttgtgtttttcccttttggggcaagacagactcattaaatattctgtacattttttctttatcaaggagatatatcagtgttgtctcatagaactgcctggattccatttatgttttttctgattccatcctgtgtccccttcatccttgactcctttggtatttcactgaatttcaaacatttgtcagagaagaaaaaagtgaggactcaggaaaaataaataaataaaagaacagccttttgcggccgcgaattc

SEQ ID NO: 489 - DNA, 418 bp, Homo sapiens
  misc_feature (1)..(418): n = a, t, g, or c
ttttttttttttttataacaacaataacaataatatttattgtttgctttgtgccaggnactctactgctttacataaattatctcattctgtcacatctaacggcaactaagtatacgcttacatctgctagtggcacctaaaataaggatattgttggtcatctttaaagaaatgtcttaacataccaaagaagtgggaatcaataggaataaaatatttaagtcttacaaaggcgtacgacactaaagtaatatagggtaccnctaaatttatatttctatgtatgggnaaggtaaaggctattccggggncatgggggctgaccntctttttatccnctttcttacaccnttctcaaattccnctttaaaccccaggtttcggnatttggtcnaattaaattaaatttggancc

SEQ ID NO: 490 - DNA, 582 bp, Homo sapiens
ttttttgttggaaataatttttatttaacagatataaaaaaaattcttaacatttacaaattgtacaaagattggtagcttttatatttttttaaaaatgctatactaagagaaaaaacaaaagaccacaacaatattccccctcataggttgagagaatgtgactatgaagaaagtattctaaccaactaaaaaaaatattgaaaccacttttgattgaagcaaaatgaataatgctagatttaaaaacagtgtgaaatcacactttggtctgtaaacatatttagctttgcttttcattcagatgtatacataaacttatttaaaatgtcatttaagtgaaccattccaaggcataataaaacccgaggtagcaaatgaaaattaaagcatttattttggtagttcttcaataatgatgcgagaaactgaattccatccagtagaagcatctccttttgggtaatctgaacaagtgccaacccagatagcaacatccactaatccagcaccaattccttcacaaagtccttccacagaagaagtgcgatgaatattaattgttgaattcatttcagggct

SEQ ID NO: 491 - DNA, 2648 bp, Homo sapiens; identical to SEQ ID NO: 98

SEQ ID NO: 492 - DNA, 456 bp, Homo sapiens
tttaaccaacagtacacttttaattaaggacctgtagctgtgcaggatgcaaacagctgggcatcagtgactttcctcctgcccccggtttgtccctgatggtggcagaagatcccagctgaccacggcccctttctctggggtcagagggagaagacaggcgcagtcagcaggggcagctgttgcaggtgggagggatattttcccacaggaacaaaggtctccatgatgataccggggtctctatagtcatgttgagagcctaatggcccttggcataattgctggtgtcggggtagaaggtgtcttggagtttgctcaagtggttgagagggagggaggtgccatagacttggaggaactggcacgaagccaaggatacaaatccaggcagggctatggggcaggatagagagcagggccttctactgaaggagtgactcaggaaggaggagg

SEQ ID NO: 493 - DNA, 533 bp, Homo sapiens
  misc_feature (1)..(533): n = a, t, g, or c
gaaaaaaaccagtttattttgagatcagtnaaaagagtctaggccacagaaaagaacagctctttaatgcaagttaaaatgtgtaaatgaatgaccgggacactgagcaacctcagatgcagacttccatccggacactggtgtggcttcagtaccgaggctgctaaagctgccagtcacaacccagcatgtcaactggttcctcatgctctgtttggtgtggaaattcacatgtgccctgacactgaggaagcaattgcttaaaatcactttccaataacagctgataaaatattttgcaggtttgtcatgcaaggtttatttattaggtggctatttcaaagtttggtataggcaaccactttaagcaggaactaaatttaatatttcactggaggcactggtaaccgatgggaagaggggcctttttcctagggggttggggttngggagtttgtgcctcncgtggnaaatttacatcctctcactcattggccaagattctccnggcttnaaaaattaggtttccggtg

SEQ ID NO: 494 - DNA, 433 bp, Homo sapiens
cacgaggcgagtcgttcttgctcttcgagggcgagaagatcaccattaacaaggacaccaaggtacccaatgcctgtttattcaccatcaacaaagaagaccacacactgggaaacatcattaaatcacgtgcctgcttccccttcgccttctgccgtgattgtcagtttcctgaggcctccccagccacgcttcctgtacagcctgcagaactctgccccagagcacatcagctatgtgccccagctctcaaacgacaccttgtccggggaggctcaccctgtccaccttcacgctggagcagcctctaggccagttcagcagccacaacatctctgacttggataccatctggctggtggtggccctcagcaacgccacccagagcttcacggccccacggacaaaccaggacatccctgctcctgccaac

SEQ ID NO: 495 - DNA, 2643 bp, Homo sapiens
gccccggcgccgccgccgcccagaccggacgacaggccacctcgtcggcgtccgcccgagtccccgcctcgccgccaacgccacaaccaccgcgcacggccccctgactccgtccagtattgatcgggagagccggagcgagctcttcggggagcagcgatgcgaccctccgggacggccggggcagcgctcctggcgctgctggctgcgctctgcccggcgagtcgggctctggaggaaaagaaagtttgccaaggcacgagtaacaagctcacgcagttgggcacttttgaagatcattttctcagcctccagaggatgttcaataactgtgaggtggtccttgggaatttggaaattacctatgtgcagaggaattatgatctttccttcttaaagaccatccaggaggtggctggttatgtcctcattgccctcaacacagtggagcgaattcctttggaaaacctgcagatcatcagaggaaatatgtactacgaaaattcctatgccttagcagtcttatctaactatgatgcaaataaaaccggactgaaggagctgcccatgagaaatttacaggaaatcctgcatggcgccgtgcggttcagcaacaaccctgccctgtgcaacgtggagagcatccagtggcgggacatagtcagcagtgactttctcagcaacatgtcgatggacttccagaaccacctgggcagctgccaaaagtgtgatccaagctgtcccaatgggagctgctggggtgcaggagaggagaactgccagaaactgaccaaaatcatctgtgcccagcagtgctccgggcgctgccgtggcaagtcccccagtgactgctgccacaaccagtgtgctgcaggctgcacaggcccccgggagagcgactgcctggtctgccgcaaattccgagacgaagccacgtgcaaggacacctgccccccactcatgctctacaaccccaccacgtaccagatggatgtgaaccccgagggcaaatacagctttggtgccacctgcgtgaagaagtgtccccgtaattatgtggtgacagatcacggctcgtgcgtccgagcctgtggggccgacagctatgagatggaggaagacggcgtccgcaagtgtaagaagtgcgaagggccttgccgcaaagtgtgtaacggaataggtattggtgaatttaaagactcactctccataaatgctacgaatattaaacacttcaaaaactgcacctccatcagtggcgatctccacatcctgccggtggcatttaggggtgactccttcacacatactcctcctctggatccacaggaactggatattctgaaaaccgtaaaggaaatcacagggtttttgctgattcaggcttggcctgaaaacaggacggacctccatgcctttgagaacctagaaatcatacgcggcaggaccaagcaacatggtcagttttctcttgcagtcgtcagcctgaacataacatccttgggattacgctccctcaaggagataagtgatggagatgtgataatttcaggaaacaaaaatttgtgctatgcaaatacaataaactggaaaaaactgtttgggacctccggtcagaaaaccaaaattataagcaacagaggtgaaaacagctgcaaggccacaggccaggtctgccatgccttgtgctcccccgagggctgctggggcccggagcccagggactgcgtctcttgccggaatgtcagccgaggcagggaatgcgtggacaagtgcaaccttctggagggtgagccaagggagtttgtggagaactctgagtgcatacagtgccacccagagtgcctgcctcaggccatgaacatcacctgcacaggacggggaccagacaactgtatccagtgtgcccactacattgacggcccccactgcgtcaagacctgcccggcaggagtcatgggagaaaacaacaccctggtctggaagtacgcagacgccggccatgtgtgccacctgtgccatccaaactgcacctacggatgcactgggccaggtcttgaaggctgtccaacgaatggaagctacatagtgtctcactttccaagatcattctacaagatgtcagtgcactgaaacatgcaggggcgtgttgagtgtggaaggatcttgacaagttgttttgaagatagcattttgctaagtccctgaggtcactggtcctcaaagcggcatggcgcatggcgtggctggttctgccacatgccagctgtgtgacctctgagactccacttcttccgtgctgaaaataaagaaggagttttactaaggaccaaacaagataatgaatgtgaaactgctccatgaaccccaaagaattatgcacatagatgcgatcattaagatgcgaagccatcgagttaccacctggcatgcttaaactgtaaagagtgggtcaaagtaaactgaattggaaaatccaaagttatgcagaaaaacaataaaggagatagtaaaaagggttaacgagccagtccaggggaagcgaagaagacaaaaagagtccttttctgggccaagtttgataaattaggcctcccgaccctttgctctgttgctttatcaactctactcggcaataacaat

SEQ ID NO: 496 - DNA, 420 bp, Homo sapiens
tttacttcaatatttgtttattcaaaagagattaacaggttgactcccacccctgccctacatactcacaccatcagtgtgacagggaaggcccagggaagaagtgctctgtgatcacagatagtccatcgcggtgagagacccacctcgcagtgaggaaaacagtgcgttttataggagcacaagtcccctggtaatgttcatgaaggttgctcttcagtggatctttcagcaagtgcatacacaaggatgacgggctttctacagttacaacatgttcaatcttctgactaatggaggcagtggtggaaattcccattcacgacgatgccatggaaggagggaggccaggacccagtcagtagcacgcagaaggcttgtgctccaaaatcaaagatcctgactgacactcctaaggaa

SEQ ID NO: 497 - DNA, 398 bp, Homo sapiens
tttttttttttttttttcttaactgaaactttgtaaaagcgaaggcatccactgctcctagaactgaccacctatccacagtgtgcaatcaatagacagtcccatccccaggctcccaggtggaaactgtggctgggagcatggcggtgcagacatcagcaacacccctctgcccagcctcactctacacctggccagaagaccagcgctcaaactggacacagaggagcggggatgggtctgaggaagctgtgaatgcgtcctcagtcctcagctagggactgtggacttacactgtgagccaggtgagctggcagagaccctgccgcagaaaaatagcacggccgatgtgcttctgttttttgttttttaagacccttctgatagccctcgtgccg

SEQ ID NO: 498 - DNA, 494 bp, Homo sapiens
atagtctaatcgattattgttttaataagaatctgtattttttcatgcaaaaaggagtttaactgtcacccaggaaaattcgcctgtggttggagttgccctgtgcgacacgcccagggaagcgctggaatgtccctttccgctcccatctgtctgttaacctgtaacccgttgtgcatgtatttgattcttcccggttagaagttttacaatctcggtgacgataggtgggttggggagagactgggttttgcagccagatattgggttacaatatcttgctgtaccatttttttgcctgtgggaccttggtcaagccatttcaacgtgccgagcctcagcctcccttctataaaatgggaagaaggaatctcctgcagggtttctgggaagattcgggctgctgtctctctagggcctaccatgttctgagtgatcagtggagaagggtgctcatgggtggggactccgacggtctgagcctggatttcttc

SEQ ID NO: 499 - DNA, 505 bp, Homo sapiens
tttatggtggtggtaatctttaagaagtttggcataaacagtaaccaagtctttggtcttcaatgcattctctagcagcctttctcaactcgggttcagccaaagaatttaaccccatagaaaatgatttgaatgactctattctcaattctcccaggaatgagtaagttaattcattaaatatttattaattcattaaatatactttaggatattagggtataattctctagataagcctttgttgagaaaggctgcatgatgattctttcaatgatgtaggtaatacagtaagattttaaactgtaacacaaacacacacatatacacacacacacaagcacaattacaaaatgccttcggatagatgactagaaataaaaataattccacaacattctaaaagcatctttatcaatatagctaatttaatgaataaatgttatttgccatctgaagtaaaactttgagtttcagagctttactttacatcacaccagctgac

SEQ ID NO: 500 - DNA, 403 bp, Homo sapiens
tttttttttggctacttgtaaatttttatttgattttctaatcggaccattgtttgtttgctttactcgtaaaaatttgttctgttgtcatctgaaagtaagaagaaagcctctgactcttctaggggaagagtcctgatactacaacattaaaataatcaactgccaggttgtgtggagcacttaccctcacacggcaaggtcacagtggctcgcagttctagcatccagctgggcttgaacacagctagagctgtcttgggtgtaacaaatacagcacacttacttacaaatgcattgttcagtaactgttcattatctaagagaggtgtgaaagcaaagactgaatacttttcctctttaacacaaccatgttagatgatattgacacgttccctttttg

SEQ ID NO: 501 - DNA, 412 bp, Homo sapiens
taatcttccaactcaatttatttgtttcagctcacgaacttttcagaatccctagtggcttagtgacaaagacctttggagagaatgatcatgggttttgatcaacactgtcgcgattgcatacagacatagctagagaacaagcccagtgattattctacagaccataggaagcatctacacctcagctgtcggccgtttggttacagaaatgcgatcctgcaagttgtcaccactatacataaagtcaggctatgatagcatatttcacttaaaaataaattatcacaatataaggcacatatgtatatggaatcagattcatgatttgaaaaatatgcttaaatcacactgaatcagcttagcagaaaaataattataaaatttgaaatatccccttttctttttgttt

SEQ ID NO: 502 - DNA, 424 bp, Homo sapiens
  misc_feature (1)..(424): n = a, t, g, or c
atgtgtgggtctgcagcttggatttcttgataatgttaaataaaactccatctactcttccacaaacacttcaagaaacctaagacttttggccagagtaacaccgaggtttgagagaaaggatatgtgtgtgagaggtgtggtttcattagaacatattatttgacttcatgttgaatcaacacttttgtgcaaaatgcagttttaccagcctctttccttgttttggtcacataatttaacttaacattctcggtacttgattttctaacataaaatgggattgagaggggaattttgaagttcccatgggtctgtcctctacattctggacagctcattattctctgcgggtattgttctcacatttaaagtagagggttaggcgggaggcagnagggcctctacaggcccnaaaggatag

SEQ ID NO: 503 - DNA, 483 bp, Homo sapiens
  misc_feature (1)..(483): n = a, t, g, or c
aacagaaaatggctaatgggcataccccatatacttaaactatcatcaacaaattataatgagtgcttacaccttttaaataatacacattattcctaagggcaaagcaaaggttgtttttaatgctttctcatctcatcacttcaaaggttgtttttaatactttctcatctcaccagtctgcaccttcctatctattgtctccttacaacctcatgctatgcttacattacataaaggagcctctatcaggcctgtcccagtcctaccatgtcccataatgccccatgttccaaaattaatccattctctcccatcatttcaagtcaagtttcccattctctcagtgggacaaaactcagctagatgttgaagggcaagaaagctctctccaaaaatctaaggacagtaccaacatatggaataactaatacgtctaatattcccaaaggttatctgcaaataaatactagtaacaaacnt

SEQ ID NO: 504 - DNA, 645 bp, Homo sapiens
ctttttttttttttttttttggtaagatactctgagtatatccagtggactagggcttctggtttcaggacattcaagctggtgtcttacaaagaacaatcatagctattaatcagaagataagcttcacagatattttctaaaaaggttgttttgcaacacacataaaagaagaacgccattcaatgaacgaggaagattacatactaatcttcaaataatcagttttgaactaaaagagattgcaaagatcatatttagactaacctcgtagttttataaaagaagaaattatttcctggcagattttttttttgtctgcaaatattttcttcctttctcacccataaagcaatatttaaaaatgtttctgccccgcccctctcatctcaatttcccttctcctttttaacagtaactatgctgccagaaaaagcacttcaaggtagataatgtgcagtccctataaaggcaaacaaacaaacaaaaaattaaactgcacaagcaagtggctctttgccaggagatggagagttgacatcctcttactttgttccccaaatctcctagggcaaggggtactcctggacatagatagattcaaagcacatctcactaccctgcctcctgtctccgccctaccct

SEQ ID NO: 505 - DNA, 469 bp, Homo sapiens
tttaacaaatgaaaggttttgggggcaaagaggaattgggagttttaagatttttgcttagagaacaatctgcccagctaacatctactcatcatttgagattcagcctagatggcatcttcccaggactgaatcacgtgctcctcttgtaaaatatatccatgatacactgtagtgcacagtagtctcctggtacttaccatgcaaaattttcatgtggtttatcacgtttcttacaatgagctccttaagaattacctgataatggttaaaattatttcaactcccagagatatctgtatttcattaggtgactagagaatacaaaagtttttaatatctagcagtgaaactttcagatattttaacaggaaaaactatgtgacaccatgtaatataacacaatataatcaaacaataccatagaggcaataaactactagtaagattagtctgacatattttttac

SEQ ID NO: 506 - DNA, 465 bp, Homo sapiens
tttgatagaaataaaataatttacattttattttcatgtaaatgtgacagcagcagcaataacataggcattcagtaaatattcttttgaattaggccagatcctaaatatcctgaaagaaacatgacatgtcactatctactccttcaagacaaagatatactttttttctttcttcacttcagtaagctggtctacaatgatggacttttatttatgcaacaatttcaatactgttcaacatattgggctttttttttctccctgtaagtagaatctgattttgaaatctagtagtgtactgacaagtgccaagctgttctaattaggttacctttcacatttataaaaatggtacgagttctctgaataccattccagaaatactaattcatacttacctattttcagtctcctaaaggttccaaagatcttaatatatgttcactcagcacaacatggctg

SEQ ID NO: 507 - DNA, 280 bp, Homo sapiens
gagaagacgacagaagggatttgcaagtgctcacaatttggggacaagtttttataaagatcttttaaagcaaatgcaagaacacttacagataagggctgtaaagattaaagataaagtatatgagcatgtacaggggtgtccaatcttttggcttccctgggccacattggaagaattaagaattatcttgggccacacataaaatacactaacactaacgataactgatgagctcaaaaaaaaaaaaaaaaaaaaaaaaaaaaagtcgtatcgatgt

SEQ ID NO: 508 - DNA, 447 bp, Homo sapiens
tttttttttttttttgcagagtttgatagcactcagaaccttttggttgctcagaacatagcttgaaaatcctgatctttcacatattgcagcctcagtccttttataaatgatgagattcaggtcttgggggtgaagtgactttccaaatgtaattccagaagttactgggaaagccaagaggaagagttcttgggtctctttatgctcctctaagctatttttctctgctgagcagttaggactcctggagggggcaggaagctgtgtgctcaagtgacatcctttctttagttttgtgtgtgcatatttgtgtaggcacatgaatgcactcttgtatacctactaggtgcagtgagagctggcttcagagagaaagggaaatgcgtgattttggggtccccagcctgagcctactttttctcgcagtattctttgttctggaat

SEQ ID NO: 509 - DNA, 689 bp, Homo sapiens
  misc_feature (1)..(689): n = a, t, g, or c
aagcttgcggccgcggaagcagcatgcagaggccgcacccacccagacagctgctcagcttctgctcatttggctacaactcctcacaggacgctggccatgcttaccattcaggctcccacaaagaagagcaaccgagagaaggtggacccagttctcacagaggcagagactcatttaggaaagagaaagcaaggacacttcattctctgcatgaagcctgcggacagaagaccagcacggtctggaatgtgcccacagacttcagagagatcacggcaaagacattcccacaaaccacagatgattatatggcacatggctctggaatcaaaagcaccttaaagtcataacctcaactccttaatcacaaataatcacaaagagaacaaaaatgtgagtgtcccaaatgaagccctgtgactaaagagcaaaattacaaaatgagattattaccaggagcaaatacagaatgaagtcaggaaaaaaaagcccaagggagctgcagcttgaagcaatgactctagccaaaaaagggggctttgcatgtgcacagagaataaagaagattaagaaataaaacaaatngcaaaagaaactaccttaaatggtattctctcccaaagaagaatgtttgcaaacttgaagggagaaacanaanaaatggtgaggganatgaaagacaaaga

SEQ ID NO: 510 - DNA, 190 bp, Homo sapiens
gagaagacgacagaaggggaacggggctgctgggatgtgggttgattgtagcagtagctcatggagatgtgacctcaaaagagtgatttttactatgtgcatactatacctccacaaacttgactttaaaaaaataaaatattcacacaaaaaaaaaaaaaaaaaaaaaaaaaaaaaaaagtcgtatcga

SEQ ID NO: 511 - DNA, 512 bp, Homo sapiens
  misc_feature (1)..(512): n = a, t, g, or c
ccaagttcaaagggcctgtggtaacaaagcaatatcctgttgaagcaccatgtcaggtacagagtcaaggtgctaaaagtgaagcaaccctgcacttccaggcagctaacagaaagagggaacaggcaaagacagcctttaatagccaggcactcagacaaccaagactaatgcctcaaagagctctacaatgcctcaattgtaaagctaatcagacaattcactagatgtaatntttgggttaactctcttcccttttctgggtattagtttttccactgaaaaaaaaatgaaagagttgaattaggtaactttggtcttttccaatcctaaaagctaccattctagactctgagctgagtacagaaacctagagggaaagaattagaacccagggacataccccttccagacttcaaactgcaacaacccatttcaatgctgatcacacagccaatccccaggccacaaaaagcaagattacatgtggaaaaacaaagccaatagccaga

SEQ ID NO: 512 - DNA, 262 bp, Homo sapiens
ttttttttttttttttttttttccaaaaacaactgctttattattaaaagttatgaaattccataaagcaaagtaatctgcattcaactaacaagtctgatccatgtattaaaaaatatataacatagattggcctgttttaacatttatattctatttaaaaagtagggactttacatattttgcaacttgagtttataaaatatatacatccaccctattcaaatcctcaagcatgagctttcattcctattaataaaag

SEQ ID NO: 513 - DNA, 477 bp, Homo sapiens
tggcttcgaaagcggccgaggcagccgaagccgctttcgaagttagcaaacaaagcgtctccccagtaaccgcccggttccagacgaggctcctgccactcaggccgcggagtcgcagcgtcgcccagcccccggctcctcctccctgcgtctctcctccctccgctcccggctccccagcggataggagccaccaatcccagccacagacaacccttcaaacgaaatagcgaggcggccccctctaacgggcggcgggggcgctggccccctccctgcgccacatctgtcccgcaccgggcgcagcagctgattcatctgcagccaagtccgggaaggaactgtgctcccggcagttgcagggcagcgtccgggcgggtggcttgtccccaggaccgcgctccccacgagccgttttaggtggtgttctcttctgtcccgagcagtcagcaaaccacagaagaaaaaaatcgtaag

SEQ ID NO: 514 - DNA, 402 bp, Homo sapiens
tttttttttttttttttaacctggagggtggtgatggtagtagtggcttagttaagcctgaacacccattccctcctgttagtctgtcaacactgagggcacagcaaccacttgggcctaggtgaagcacgtggctcttgccatttatggcctggcttttgggcaattgccctatagtatttatggaggaaaaacagaatcatctttgagaaatttttcctgactaaaaaactcaggccaggtgcagctgactggggaccagaataacagtgcacattttgttgggaaatattttgattgtgaaactatatcggtccagtgtatgcccccagataagcgctgtgtattggttgcagtctttcagcatggaccctgtgaagtaggtgcctacagatatccctt

SEQ ID NO: 515 - DNA, 470 bp, Homo sapiens
aagagaaataatagtaacgataatagctagtatctacttgagtgcacactctgtcaggaatcatgctaagtaggtctcattcaatcctcaccacagtctacggggttgggtatatggagagaaggggattctgattaagcccccgtgactctacaaaggggtctcctgcaatgggcacctgaaaaagcctcgactagtaaaggaagaagctgtttaaagacgaaacaaggaacccaaatttctcaggcagtgtgagcctacacacggaaagaagtctcaggcctgaagcacaggcacctttctattctcctgacagcccacccgagggacatcaagagccacagatgtcatgataggtgtgtgagtgctatagaaggaatgtttgtgtccctccaaaattcatgttaaagacctaacctccaaagtaatgttattttgaggtggggcctttgggagacgattaggtcata

SEQ ID NO: 516 - DNA, 445 bp, Homo sapiens
ttttaaacacagtgggttgccagttactgcgtgaattttctggcgctgggacaatgaccttccctgcatccacaggagccctctgagggagctggccactctgcctcctagtcaccgtgaggcttgttattaagctactgtgtatgtctgtaccttttgtaacatggacctgctgtccacaaggtaacaaactaaggctgtcatggatgcacactagggtttgcaagttaaaatttaatcctggtcttagacatagaagttatttttaaatttaagtgacacatgctgcacaacaaaccccaggttctagctttcactctacttttgcagttaactacatgcagtcaaaatttaaaagtgccaaacgctagcagatcaaatccataacattttcaaacagatgaattttatcacttacaatgtcaaatacaaaaagtgtatggaa

SEQ ID NO: 517 - DNA, 367 bp, Homo sapiens
gagacaagagtctcgctgtcaccaggctggagtgcagtggcacgatctcggctcactgcagcctccgcctccggggttcaagcgattctcctgcctcagcctctagagtagctgagattacaggcaagcgccaccacgcccagctaatttttgtatttttaatagaggtggggtttcaccatgttggccaggatggtctcaatctcctgacttcgtgatccgcccgcctggccaacgtacttattttttagtttttaggtatttgtacctagaatgtatggtctttctaaaacatcagcttttctcagagctttatagtcggtacgtttaagttcctatggcttccctttcagactttcgctaaagc

SEQ ID NO: 518 - DNA, 514 bp, Homo sapiens
atctctacagctgtctataacaaaactttttaggaaagtaccacaaatatgttaaacagaagaagcaaatctcaaataatgtgcaaaagctgtgagtttcttcttacataaaactggtacctaagcaagtgagggttcattttatttttcactcaccaatccccatatcattatacagtaacaccatacagccaaaacggccatgatattcctcccttctcagccaaaattgggcaagagagaatgacccttgtaggggaaaagaaacctctacgataaactgaaatgccaccatcagggtttgttgaaactgtaggaacagggtctacgactcacttagctgctaatgagtttctatgattccagatggagtagttcaaagtaagaagtgaaggggctggacctgtctgtgaatcagaatgagcccacgtcctccaggaaggttttttatagcctcctctcccaaatggaaaagccaaatccatcattgatgcttccatcagaacctgtagag

SEQ ID NO: 519 - DNA, 218 bp, Homo sapiens
gatctcaaaagtattcctcagggtagtctccattcctgtcatttttcctcctattcatgagacggaaaaattatgaccatggtacagagttgtatcaaggaaatgaagaactagaacattgaattgaaaggttttgaaagggttcacaatttcttttcattttctattaatgtcttcttttaaattctcttaagaataaaacttttttctaatatttt

SEQ ID NO: 520 - DNA, 549 bp, Homo sapiens
tagcatttgaaaacattatttaatacagattttggtaacattaactaatacttattccaagattatatggtaaatatttatatttatactgccagactacatagagaaacagggatttaattctaagttatattaccccaaaaagaaatactttctaatattgaattcaacaagatgtaccaccaacagagacagtgaatgtatttcaccttcctaaacagctatttttatatgaaaatcctaaattatctacatcagtcaatgactggcatttcaagagtaaatgattcattttacttacaatgcatcaagataaaaaggttacactgaacaactagaatgtttactgaaattaatcttattaaagtaaaacttaaaaaacttatttgggacattttcattgcttacactcaacgaacgtgaaacagagaaaaacagtcacagaatcgtgctaagtttataataaataattcacatacaacataggttaaattatcaaagaaattaaactgacatctttataccttttgcagatttaacacatttcta

SEQ ID NO: 521 - DNA, 3492 bp, Homo sapiens; identical to SEQ ID NO: 23

SEQ ID NO: 522 - DNA, 475 bp, Homo sapiens
  misc_feature (1)..(475): n = a, t, g, or c
tccagaaaaggatattttttttattcaagtaactgcaaataggaaaccagagagggagccccaggctgggacaaatcatggctacccctccccaacagaacagggggaggaggtggcccctacaccctttatggtcgattcgggcccccttgctcactctgctgcagcatcctaggggcagggccccaccttccctgggactggggtagtcggtcacccagcctgccatgccccagcccctcttccccacaaagagtatcttgggggaggggatcgtgggcagaacaggaggcaatgaggatgaacatttggcgctggtagcagcagcaatgacggatgtcgaagaatggaacattgaacaaaaaacaacacaactgtccagaggtagtttgtgaacagaggaaaaatggaaccaaaaccttggggggcaaggatgagcangaagggggttggaagcgggcaaggtgagctcctt

SEQ ID NO: 523 - DNA, 621 bp, Homo sapiens
  misc_feature (1)..(621): n = a, t, g, or c
tttttttccctctaaatctgtcagtttatagaacatataggggacagaaaaggtgtacatgatcccattaggatacattcagtaaaatccactgaaggacaattctataggacaaacaacttagtttcttcaaaaattaaaaacaggaaagttaaatctatagattatattaacaaaatgcaagatctagatcttgcctggatcttgactcgaataaaccaactgttaaaaaaaacttacgagacaatcaggaagtttgaatattgactggtacttggcatcaaaaaatgttttagcagtcttacacaatggtattgtggttatgttcaaaaaagtaccctatctttggagttatatttgaatgtctctgatcacacaaacatgaaaatactatgcctgttaatgggactcaaactgatccctgtgggttggggcaggggataggtggggatgcangtaaacaagactgaccacaggacagctgttggaggatgggtacacagagcttcattctgctattctttttgtgcatttgtgaaaatttccataataaaatgtttttaaaaatgagtttggatagcattatactataaaatattttaaaatttccttctttaatga

SEQ ID NO: 524 - DNA, 690 bp, Homo sapiens
  misc_feature (1)..(690): n = a, t, g, or c
aaataatttactttattacaaagatagtatacaatttctagaaaatacatgcatgtacaaagattgaaataaaaaaaacactcataaatatccagatttaaatgtcagcatataccttcctgatctttttctatcatactgtatctatcaacatctaacctgcttttttaactataagtcatacattttgccatatcagtacacttttttctgtaacattatttttagagcatatcaaaccatagtttatttaaccaatccccaattaattcataattagaatatttcgtgtttttccagtataacagttctataatctttgattataacctttgtgtaaattcctataagtattgagtcaaaggagacacacatcttttcaggcattacatataaaataaatactaaactagactccaggaaagtggtatcaattcacattcccaatagcactgtcccaatggggctaatttatctcctttttaatctcagcgtatttccagttataacataccatttttacctcttgattcaacaatngtacttagaagaaagctctaaaatcccaaactgaagcttncctttaggaccctnnctattacaantccgtatgaaagtaccagatttcgagagtgacatcaggccaacggaggggagtgaactactgggctctctccctaccacatattn

SEQ ID NO: 525 - DNA, 719 bp, Homo sapiens
  misc_feature (1)..(719): n = a, t, g, or c
gtgaaagagttgattatttcaacagtattggttaagtcacaacgacgaagtgctgagaaggttatgggtaccaggaagaaacaaacagaagtcttaagattagaatgagaaccaaagagaatttaaccctgccatttttttttttttaacaccaagatcctaagtaattccaaatgccttagatatcaatgaaagctacacaccattgagatgggcaaaattctttctctacaaagggagtaatcaagtaaatacctgttctctttcaatggactgttgcctattgagcattgtggatgatgtgttttcagatttccaggtgaagttctgaccctacctgtttggccaaagacgtaaattgagaggaaaggccttggtcttcctgatcaaccagcatttaacgaacagtggcttaatgcagatcactcaagaggcagcatagcaatgtaaaaggaatataagtaggtgttggatgcctttttcctagaccaggaatggggaatacataacacctgtgccaccgctcttttaaggaggcattatgaatgagtgcagcattcctgtcctctgtgccaggatttggtcttagaatccatgtcagattggtgcttccagacatctattcccaggtccatcagaagtgaaaatgaagggctattttgccatcccttgcccttttaccgaggagtgaaaagaattaagtgggtagacccccnccc

SEQ ID NO: 526 - DNA, 554 bp, Homo sapiens
  misc_feature (1)..(554): n = a, t, g, or c
gttgttgttgtttgtttgtttgttttttacactgaggcatggtctctctgtgttacccaggctggagtacagtggctattctcagttacaatcacagctcactgtagccttaaactcttagctcaagcaatcctcctgccttagcctcctgagtagctgggactataggcatgtgccactatactcagcttagactgctatttttaatcttaaattggctgttatataagcaggtcttaccttatatacaaacttcttaaaggctgagctattttacaatagctaaatacaatagcaccaagttgagtcctaagcatataaaagaacatggatattttttgaatggatctgaattttacatatatataataattgtgtcatttactattttaaaaacattatgtgattacattttcagcatataagctaatgacattaatctaggcataacatctaacaaagaaatggtaagcagtggcaacataaacacaatttatatcctaattcataggactttatttttattcctgaaaaaccattaaacattggncaaa

SEQ ID NO: 527 - DNA, 2016 bp, Homo sapiens
gaatcttggcccagaatctcactctcccagccccatggaaagatggggaaaagatttcattctgctgatcaaatttgttagaagacattctttagagtctgaaaaaatatatttcattagcagttctctaggtagtggaatttttagtgatgtttactcttttttccttgttctaattttcctctaataaacagaaaaaaagcaagagtaacccaccaaatttggataaagggcttctgcttttcatattctcttcaaccagaacagcttaacttttctccatttatttatttaagtatttattcatatttgaaacaggctggggtgcagtggcatgatctcagctcactgcaacctccacctctcgggtacaagtgattctcctgccttggcctcccaaagtgctgggattataggcgtgagccaccgcacctggccttaatttgatttttattatccacaacactcatatctctttttgatcctactgtaatatcacattatcctacctaaagatgaattgttccaaccctgatgctttggtaatcatcttttctaaattaaaaattgaggccaggtgcagtggctcaggcctgtaatcccaacactttgggaggacgaggcaggtggatcgcttgagatcaggagtgagagaccagcttggccaacatggtgaaaccccatctctactaaaaatgcagaaaaattagctgggcatggtggtgcatgcctgtaatcctagctacttgggaagctgaggcacgagaatctcttgaacccgggaaggagagattgcagtgagccaagatcatgccactgcactccagcctgggtgacagaacgagaccctgtctcaaaaaaagaaaaaaaaaaaagagagagagagatttgtaatctagcaaaatatgttatttacttattttctttccaacttttagtgtgggcccaagcgggtacctgtgcaggtttgtttcatgagtaaattgtgtgtcatgggggtttgttttacagatgattttgttactgagataatcagcataatatgtgatatttggtttttaatccttaccctcctcttatctccaccctcaggtaggccccagtgtctgttgttcccttctttgtgtccatgtgtactcaatgtttagctcccacttataagtgagaatatgcagtatttggttttctgttcctgcattaatttatttagagaatgacctttgttatggaaaaacaaagaaagaaagaaatcaggtcttttttggaaaatctgggacattgaattgttacacgtaacatgtgtccccctagggacataggtcactttcagtatttgccaaagcattaggtcagccagacatgtgaaacatctcggagcttaataactgagctgcttcaatgtgttttgataaaagtttaaattctctggccccaatttattgaacacatgcctttgacaatacagcatttctttcttaggctattagtgaaagattaaccatctactcagtgattgttattgtgcctgtatgtgtgcagtatgaacagttatgtaacaaaacttcaaagattagagacctttaaaaggatctggggaaataggaagagtctataatcttataggaaaggaatgaattatgcaagcaactaaaagtgtgtcaatattctctgcttcacaaacaaattggaaaccagtggtaaactttagatcagaaacagaaactcaaaaaatgaaagaactggccatgagcagtggctcaggcctgtaatcccagcactttgggaggtcgaggcaggcggatcacctgaggtcgggagtttgagaccagcctgaccaacatggagaaaccctatctttactaaaaatacaaaaaattagacaggcatgatggcagatgcctgtaatcccagctacttgggaggctgaggcaggagaatcacttgaacctgggagatggaggttgcagtgagctgagaatgcacggtagcctaggtgacagggtgagacgctatctc

SEQ ID NO: 528 - DNA, 576 bp, Homo sapiens
  misc_feature (1)..(576): n = a, t, g, or c
aaaatgtcaataacaagttttatttacaaagtaatcgtcctctcacatcacatttggggttacatgtatcactgttgtacgctggtagcatggctatttgaaagattataatttatgagctattactcagtgggatttttgcaataaggtacttcatgagacaaaatggaaaaaggagaattaaattaaaatgcacaactaatatttatctactacagacataatatttctcagttgtgaactaattactatgcttggaaaatgctagcatcctcataaatattttggttctattgggatacaaaatctgatttcgcaaactttgcaaaggcacattttggctgggcacagtggctcaggcctgtaatcccagcactttgggaggcagaggcgggcggatcatgaggtcaggagatcgagaccatcctgactaacacgatgaaacccgctttactaaaaatacnaaaaaattagccaggcgtggtggccggaacctgtaagtcccagcttcttgggaaggctnaagcaggaaaatggcgtgaancccgggaggcggaacttgcatgagccaaaacc

SEQ ID NO: 529 - DNA, 2811 bp, Homo sapiens
cgccttgcagtttgatctcagactgctgtgctagcaatcagcgagactccgtgggcgtaggaccctccgagccagtgagatgaacccggtacctcagatggaaatgcagaaatcacccgtcttctgcgtcgctcacgctgggagctgtagaccggagctgttcctgttcggccatcttggctcctccctcaggtatccttcagaaagcctgggcaataaaccgaaggcttctaaaaagagcaaagtgtctggtgagtcaagcagaatctcaaagctgaactaaatttggtgaatctggactttgccagccctgaagaagaataagcatgaaggaactcttcaagtagctagtgcatttgtgttgctgtcagcaaaatagccagttggagagctatgctgttctccactaaaagaattgtagaaccattgggctttaatagatttgaaagactgtataattgaatttataatcatctggcttagaaaatatgcaaaatcacattcatagtgagcagatgagttatggtatccgtggacaattctgataggaaatattggttatatctggtgaaacccatgataaaccaaaggcacgttaagggcagatggttggagttggggtatgagtgttggtcatacggtggaggggaaaagagtaggatgttaggatcatgcagaaattatgtggttgccctacagaaatgataagccataaagttctactctggccagtgttttaagtcgatgctagaaaagaaaaacaatagtggcacaggggttggttatttgttttccacaggccaagaatatgtcaaaataaagcccaataggatgtatattcagtggtcaagtagactgagagatgttaacacacttattcatggcatcatttcagattttgcctatagtaggcattcaaaagatgtttgttaaattttataaataaacaaaagctatatcagcatggcctttttctaatccaaaacctgggcacacagccaggataaacttaagctgtccaaaagccatgtgcgctctcgccagaatcatcaattctctccagtcatttcactatgaagaaggcctggatgaacttaatgggaaagccccattagctgccactcttggattgcatatctacgtatccttcagatttcatgtccctgatatatttgtgttcttgctagtcctgattttaaattattgcttttccttttaatattgttctgatttatttttatatgttactcaatattctttaatgacagcaaataatgataaaaataatagctgccatggcctattgaggcttcctatgacagaaactcttctaagataaaatttcatcctcatgacaactcataacctttgagaaagtttccatagatttctattttactactaaaaatactgtggtttagtgagattatgcaattaactcaaattcacaaagataggaaatgcttcagctgggatgcaaacctctatctaagagaaaaacccgatttcctcattgctatatataccattaatttggagcaaagcagaatcacttaaaaatccttttaagtgatgattaaataaatcatcaattgttaaacaatgattagattcctaattattttcagtcatttgtttaccactaaatataacaatagtagtaataataataatgataacccatctgcctgtgttcttaagtgtcttatatattagttgtggaaataagacatatatgatgaactgttaaaaactatagaagagaatttatacctaaatatgttcatgtattaagtagtacaagaaagtcatctggaaattttaaaatgaaaggaaatctgcaaatattaagtcaactgggcatttcttttcaggaaatgaaaattaagctgaatctgaagggtgctaagaacaaaattgatggaggtgaagacagagacttctacataaaggaaatagttaggaattaagcacagagacaaaaataaaagacagtgttttgtaggggcagagtgattgggcatagccaagaaacaggatatattaagtagattgataataaggtttcaatgcttcaaaagttctaagcttagatgcttggaaacaaaatttgaccaagaatttgggtaataaatttgaagaataaaatgagaagcttaatttgcatgtgttcagtttaaaatgatatccggttggaaataccaaattgtagagctggagacattgtactgggaattgagtaatggtcaggatttattacactgggacagaagagaccaacacatagaatacactgaaggtcaggttctgtccagaaaccactcaacaccagagcattaatgaatatgtgaataagtaagtgcatcttcttagctcaggcatggaaactgatttaaaatgtaagaagtctgtatggatgggagaaagaagtggaaatcaatttaagggaaaaaaaagcaaaatcagaatatacaatctctcttctgaggccctagtcatatgttgctaactatagaggagtcattagataaaagtgtgtacatttggaagcaaacaaagactgcatcccatgagatttcataagctatgattattataaagagcaatagactctcaaaaatactcttaaaatactatacataaaaatagctagtatttaaaggctcataaaattcttgaacaggtattagccatttaagaagtgatggtagaaagagaaatgtataggtcagagaacagtccttggaaaatgaaaggagttaggaagtaaaagaaagaaaatcaagggaaataaatgaaagaatgacagag

SEQ ID NO: 530 - DNA, 579 bp, Homo sapiens
tttcatttacacatttattttctatctcgcttattctaccagactgaaatggagaacaatgccagcaattttatagacattttgacataaagtaaacaagtattttgatgttgaacaattgtacagactactacatgcatataggtatgctgattggtgcagaaatattgagttgatcaacaaaactattaatacgaaatcacatttcctttttatggagttaaaatgcagcagatatgggaacattgatacaaacaccattaaatggcagaaaaaggcattgtagtaacgatgcaggatggacagctgaacaaacacgagtatgctaactcatatcctgtctacaaaactgaaataagaacattttgtatgcaaatagaatgaaagaaagcatgttgaggcaggtgaatgagactagacaacaagacttaaccacttatgtttaagcttctattgagagtttgtattaaaagtatttcaacatggtataagaagaaatgctaatgctattatgtgtgtggacaggataggataattcaattgagaattcataaataatgaaatactgattgtgcttct

SEQ ID NO: 531 - DNA, 535 bp, Homo sapiens
tcattttagggatttattataaaaactatacaaactttttatcactcacaaatgatgaaaaattttaaacaattagtatcctccctccaaaatagtgtgttctgtctttacagtcttcactggcagtgcattcagatagtatagaaaataacaaacattccatataactttgtccctacagtaaataattttttaaaacttttcatcaagtttcagtgttactgaagttaattatagacagtaaggattacagaataagcagtaaatggtcacctgcactgtatttttcaaagcaaaaattgttttatattttctatgttgttttatcctgccccaaacacttaaagcaaaagttaaagatttttccagttacctgaaacttcaaaaatctattgtactttgaaaaaactttaaaaagcagcatcatttaaatagtggttaactcataaacgtgtatgcaacaacattccacaaccctaataccactcaggcctgcagagtcaccagctcacaataattcagtgctctgaaagct

SEQ ID NO: 532 - DNA, 403 bp, Homo sapiens
acattttagaccatttattggaggtatttgttgcacatgtggttttagtgtaacgtaaacacaacatctctccccagaaacacttaacctgagttggaaatgaaatatgaactgaagagattcttaattcacacatacacttctcctcaaaatattagcaatgattccaactgaggattctgcttgaagttcaggactcggtcccaggacaggaatgaaggaaaactccgtgcagttcgaacgctctgctgaagtcaaaggactgcacctgcgggcctcttaaatagagctagcttcctcaaacacccgcggaacgaggtctggctgcgcaggcatttttgcttcacaccagcaggatagccaccaacataaatgggattgttggtgtccactgaggtagact

SEQ ID NO: 533 - DNA, 2023 bp, Homo sapiens
catttttaaaccatcagatcgcatgatggcttgatctcactcaccatcacaagaacagcatgggggaaatccacccccacaatccagtcacctcccaccaggtccctccgtcaacaccgtgtggattataattccagatgagatgtgggtggggacacagagccaaatcatatcaggatgttttctgttttgtttacctgagacaaagtgctgttcacctctcctctcccacataatcaggggctccctcctgcggctccggtagcttttcctcactttcctttcagccctcgggacaccttccttggctcctttcagagctcagttactacttgggcccaatgtcaatgccaccttctagattctttccggcagcacctcctctggtcgcacatttctcttccagttattggagctgtcaaaaaagctccccagtgatggacgatagcgatttcactgtgctcacagactggtcaggaaaccaaacagctgccacagtgaatgtgttgatagcagcggggcagcagtagcactcgctcacaggcctggtggttggtgctggcccccaccctgaatacctacatgtggcttctccatgtggcctgtgcatcctcactgaagctcagcctgtctctccaaattggtctttccactcacctgttccccaaacctgcccagaccttcctgctgtaggcttttcccttcacttggcacactctttcccttgtcttcccatggccccatctaagccccactgtcagctgaagtgttatattctttgaggggccacctgaagccaccttgcaatgagggcctccgttttctacctcagctcaccatttgttcacagcacttgtcactgtggcgagttacttgtctatggcctgttgtcgttctcctgcctagacccagtgggctgagtgggggcaagtgttggcttttatgtccagttttgatcttggtgccagcacattgcctgggtggaagcatgtcctactatcggttacagggatgtcattctgcccagtgctcaggggcatacacttggatcccagttgtgtgcccttggacacgttgcttaacctctctgtgcatcagttgggtgataatatctactcctggcacattttcagcgttggctgagttacatgtacagtgcttaggccacctgggggagagtaagagtgggatacgtgaggatgtggagtctgttgcatttctgtctgctgctggcatccttcttgtcttgttttgagttgctcgcctctgtctgctccctagggcgtagatttgaggaatattcctggttcttcccaggcagcaggggctcaggctgtgctggagtcagctaggctaaggggctggtctggcatccgcgttgtcctgtcacctccttggtgttttctccaggcctggatctgtgctgtgtgggcacctgtattcctccctcctgccctcactgattctccatacctttcttctcgagagtgccaagcccctcccatgtgttcttgttcatacctaggatcccgggaaggggctggggaagacggtgcccaggtgccctgggtaaacaaagccacctgactccacgggaatggagtgggtggaggggatctgaggtctgcattttgagtatctctggtctcagaggatgaagcatttggtgggggttgggggtggggggtagggtggaagaatctaaagtcttaaaagaaaatggcagttatttgtgggacagggctgtgttgagacttggcatgcttctttttaagagtcagtgttgtaatttaggtataagtgaagcagtactttgtattagtttcctgtaggcgctgtaacaaagcaccacaaactggttgacttaaaacaacagacatggccgggcacggtggctcacgactgtaatcccagcactttgggaggccgaggcgggcagatcacaaggtcaagagattgagaccatcctggctaacacggtgaaaccctgtctctactaaaaatacaaaaaaaaaaaaaaaaa

SEQ ID NO: 534 - DNA, 2475 bp, Homo sapiens
ggaaaaggaagagggagtggtcagatgaatctgaggaggagccggagaaggagctcgcccctgagcctgaggagacctgggtagtggagacgctgtgtgggctcaagatgaagctgaagcaacagcgagtgtcacccatcctccttgagcaccacaaggacttcaacagtcagcttgcccctggggtagatcccagccccccgcataggtccttttgctggaaaaggaagatggagtggtgggacaaatctgaggagtcggaggaggagccacggaaggtgctcgcccctgagcctgaggagatctgggtggcggagatgctgtgtggcctcaagatgaagctgaagcgacggcgagtgtcgctcgtgctccctgagcaccacgaggccttcaacaggctgcttgaggatcctgtcattaaaagattcctggcctgggacaaagatctgagggtgtcggacaagtatctccttgctatggtcatagcgtatttcagccgagccggcttcccctcctggcaataccaacgccttcatttcttcctggctctctacctggccaatgacatggaggaggacgacgaggactccaaacaaaacatcttccacttcctgtatgggaagaaccgctctcgcatacccttgctccgtaagcgtcggttccagttataccgttccatgaacccgagggccaggaagaaccgctctcacatacccttggtccgtaagcgtcggttccagttacgccgttgcatgaacccgagggccaggaagaaccgctctcagatagtcctgttccagaaacgtcggttccacttcttctgttccatgagctgcagggcttgggtttccccagaggagttggaggagatccaggcttatgacccagagcactgggtgtgggcgcgagatcgcgctcgcctttcctagagctccagggaccatggaggcctgaggtcatcggcctgagagaagaacaccggacccaggggagatgtggattttcagcaggaactttattccaatgctaatggcagacaccaggaaggaggagaggaaccatttgtgcagatcatctagaagaacctggaccattcttgatggagctgaatacagtgatcacgttgtcctcctaggagcaggggtggggggagggggatggggtccttctaggagtccttggagaaaagtaagaaaccaggagtgtttccagttccaccctttcctggggcaccaccaccctttttatattgctgaattccaacctccctggggcggaacctggaggtcctgtttcttacggacttggttgccacagtccaggagcatttgaaggcacaatgcaggggctcagattggcacagaattcttttgtgaaatatcagtgccacagattgtaacagatagcttcatgcacactctgcattttattggtttgtttggaaaatgttggccattgaattattcatagatttatttcaaatagtttggaaattgttgtacttttgaaaacatgctgttcctgtagttttttgatgagagttatagttgttatatatacataaagataattttcttttcatttttaagagacaattctttttatcctaaatattttatcatctttaaatttgtttctgtattattatatgtgctcctgaagcgagcactctttttatctatgatacttccataataatctcttctatttatagctattggtagttcccctaaattctgacgatagaaatttttatttgctgtttaggtttgtgactgaattgtgagaattcagttgtgatttttaacatgtgtcagatatatatactaacacgtctaatatatactattttattggtttattttgaaaaacatgggtatagaattatttaaatattattttatttatttaaatatttattaaatatatttatttatttaaatgttattattactttaaatattattttaaatattttggaaatactggtatttttgaatagatgctgtttctataaagctgtgtgatggtattataactgttatatacacatacatataattttgttttcctttttaagagaggattcttttcatcctaaatcttttacctttcaatctttgtatctattattacacgtgctgctgaagggagcatggtttttatctatgatacttagttaacatatatattacatttatagctatgtagtagttcccctaaattcttgtaaaaataaatttttatttgatatttcatctatgtttgaaatgtgagaattcagatgtaattttttaccttgatttggcatgtttgtatgttactttaaagaggatgtgtgttctaaaggaggacatgagctgtgtgttttcaagagaacaatagagtgtgtctcttggggaaacgtaataaaaatgaacttttctcaccttcaaaaaaaaaaaaaaaaaaaaaaaaaaaaaaaaaaaaaaaaaa

SEQ ID NO: 535 - DNA, 531 bp, Homo sapiens
tttttttttttttttttccacagttggaagaaaatgtttatttagcaaaaaggtatggagtaaaattggtagaatagaaaggagaaattagaagtggggaattctgagaggctgttttaaaacatggtaactgggaaataattttgacaaaattctcataggtaatgaagcttcatatgcccttactgcctaattaaaaggcacctaataaccaattttatttgtattaattgtattgggaataattttctctaaccttctacctttcataaggaaaaatacaatccgtgaacacctagatggttctgttttcactgtatggcacaaagtatcaatgatttaactgtggagagtagtatcaagtagagacttgtcttcttgtgttcaggaagtattagcctttaactatgcattttaattgtcaggtatgcctttgccatttgaactgtgttactcttccctatcacagcataatggagataaaaccattgtttttcattacctaaccaagagtatcaactaatttaaata

SEQ ID NO: 536 - DNA, 483 bp, Homo sapiens
gtatttagccaacaaccaaattttaatttttaattaggagacattaaaatataattagcgcaaataacagaatgacaaaggtaacagaatgacaaaggtacagaaattcataaaggtcaaaggaagcagcatttttaaccatagcaagaaatgttctaacatgaatttagggaattatggtgagtgcttcaccttccccacattcgcctcctaggcaaattttctagaagcaacatttctatttgacaagattataatgataataatacagavatagctgtcaaaaccagacagtgtacattcttcacagtcaagagactctcamacctcaataaacaccatgtataaaggaacatagtaaattccaacttagcacagacataacaaaattaattcatcgatcagagactgatacaattttgaatatgcactttccagaatgargcagaggrcaatagrgccatctgcagctgtcaamcctgt

SEQ ID NO: 537 - DNA, 501 bp, Homo sapiens
ttcttttcaagatagatacaaagaacttcaggaaaaacataaacaagaattggaagacatgaggaaagctggtcacgaagccctcagcattattgtggatgaatataaggcactactgcagtcttcagttaagcaacaagtagaagctattgaaaaacagtacatttctgcaattgagaaacaggcacacaagtgtgaggagttgctaaatgctcagcatcagaggctccttgaagtgctagatacagagaaggaactgttaaaagaaaaaataaaggaagctttgattcagcaatctcaagaacagaaggaaatattggaaaagtgtttggaggaagaaaggcaaagaaataaagaggcattagtatccgctgcaaacttgaaaaagaagcaatgaaggatgcagttttaaaagtcgtagaagaagaaagaaaaaatttagaaaaagcgcatgctgaagaaagggaattatggaagacagaacatgcaaaagatcaagac

SEQ ID NO: 538 - DNA, 512 bp, Homo sapiens
  misc_feature (1)..(512): n = a, t, g, or c
aaaaattatatttaatacaagtgaatagattagaagatctgaaatgttataaagcaatatacacaacgaataaataatttgcacaggagagtcatgtctacattacataacactgtctagtatgggaatacttaaagtaaatccagtgataatggagaaagtccataaaaatgctaacctgtcttcccttgtatgaaattgttcaagtataaaaatccaattcagtgtaaaataggattcaatttagtttaagaataaaaattgcaagtattgcagtttcagaagaaaaatgtaaagcagcatttaaaaactacataatagtgttaaactaatgaattaccaataaatgaaatctacacaggcaaaatcagaggaggaagcatgaaactagcaatatatcgtttaaaaaaaaatctaaaaactaaactaaaatgtgttaatgtaagagtactctcttatacagtgcacatatgaatttaaataaatccaagtcaacatctttagntgaatag

SEQ ID NO: 539 - DNA, 635 bp, Homo sapiens
ttcaattaaataattttattgggggaaaaaaaccactttgagcaccaaagcaagaaaagtgtattattcaatcagtttcccagatcacatgccaagaacacaatgctcactgtggtgcctggcagacggtccacaaccagcgggtgcgttcagcttgaatggaccggggtcccacagtgtttgtgccacaagtcaatggccttgctcacgatcgcgtctgagctgtcctggggaatattttccagaaactttgttatcttctctgcactgttcagtgccataacttttattttaaaggttaataaaatttcgacagctacaaaaactaggatcttacaggatccactcacaactttatcccaaaccctctgtaaactggattcaggcaaacatcccgcaaagcacctcttgaaccagagatcataaggaagtttgggcgccgcggaacacatcctcagatgagtcagcagtctgccatcttccagattcaagtattgttcaaacgcttttggcaactggggcaaggaatcccggtacttggtatttaattggttcacaaagcgtcgggtgatccagtaacagtcgacactatcttccaccatttcctccatggctttagctatggcaagaaacac

SEQ ID NO: 540 - DNA, 646 bp, Homo sapiens
  misc_feature (1)..(646): n = a, t, g, or c
tnnnctactctatggaaaattcatgcctgtaggtttaattgcaagtgccagtttgctgatggccgccaaagttggagttcgtatgttgatgacatctgattagcagaagtcatgtnccagcttggactcatgaaggattaaaaatctgcatctcccactattttcaatgtattaagagaaataagtgcagcatttgggcatctgacattttacctaaaaaaaaaaaggnnaccanttggggggggggggnggaaatncagnggtncccattttnccccnnnaggggnggggagaatttaaaatnagtttttngancccnccatggngnccgancctggtttttggattnannctctncctgtttntttgggnaatncnnaagggtaaatttttaggngtggnaatngananccctgaanccccacccccnttcaggggaaaaggntnaaaaaacnctctngangattnagantttttttttngggtcnccttagncacagntttttngganttcggnntcaatggttcagttncannnnnnnnnnnnnnnnnnnnncccnnnccnnnnnnnnnnnnnnnnnnnnnnnnnnnnnnnnnnnnnnnnnnnnnnnnnnnnncnnnnnnnnnnnnnnnnnnnnnnnnnccc

SEQ ID NO: 541 - DNA, 1564 bp, Homo sapiens
ggcacgaggccgaggcggcggggctcgcgcgggtggagccgcctcggcgttcgagcggggtgggggctgcccggttgagatttcccggcgggtcccggcctctgcgtgcacgcgcctgcgtgctcgcgctcgcggttctggcgctgctggaataatgctgacagcatgtctgcacattccatgctctgtgaacgaatcgccatagccaaggaactgatcaagagagcagaatcactttctagatcaagaaaaggtggcatagaaggtggtgcaaagctgtgcagcaaattgaaggcagaattaaaattcttgcagaaagtagaagctgggaaagtagctattaaagagtctcatttacagagcactaacctaacacacctgagagccattgtggaatcagcagaaaacctggaagaagttgttagtgttcttcatgtctttggttatacagataccttaggagaaaagcaaacccttgtggtagatgtagttgcaaatggtggtcatacttgggtgaaagccattggccggaaggctgaagctcttcataacatctggctgggcaggggccaatatggtgacaaaagcatcattgagcaggctgaagacttcctccaggccagtcaccagcagccagtgcagtatagcaaccctcacatcatctttgcattttacaacagtgtctccagccccatggcagagaagctgaaagaaatgggcatatctgtgagaggagacatagtagcagtcaacgctctgttagatcaccctgaagagcttcaaccaagtgagagtgaatcagatgatgagggccctgaacttttgcaggtgaccagagttgaccgagaaaatatactagcaagtgttgcgtttccaacagaaattaaggtcgatgtgtgcaaaagagtaaatctggacattactactttaatcacatatgtatctgccctcagctatggaggctgccactttattttcaaagagaaagtgctcacagaacaagcagagcaagagaggaaagagcaggttctacctcagctggaggcctttatgaaggacaaggagttgtttgcttgtgaatctgctgtcaaggactttcagtctattttagataccttaggaggacctggggagagagagagggccactgtgttaattaagcgaattaatgtggtaccagaccagccttctgagcgtgccttgagactagtggccagttcaaaaattaatagccgctcattaacaatttttgggacgggagacaccctaaaagccatcacaatgactgctaatagtggttttgtcagagctgcaaacaaccagggtgttaaatttagtgtgtttatccatcagcccagagcacttactgagagtaaagaggctctagccacccccttaccaaaagactacacaactgacagtgaacactaaagataccctttaaatatttttgtggaagtaagttatttataccaaaggctgggtcttcccatctaaactggtgggaaaaaaggtctatagtaaaagtaaaactgagaactcttaaaaaaaaaaaaaaaaaaaa

SEQ ID NO: 542 - DNA, 1837 bp, Homo sapiens
ggcacgaggcccgggtcgagcatgtagcggctgctggcggcggggctcccggggcgggccgggcgggccgcgggagccgcacgcggcgatatggaagaggagggcaagaagggcaagaagcctggaattgtctcgccatttaaacgagtattcctaaaaggtgaaaagagtagagataagaaagcccatgagaaggtgacagagaggcgccctctgcacactgtggtgttgtcattgcctgagcgcgtcgagccagacagactgctgagcgactatattgagaaggaggtaaagtatttaggtcagttaacgtccataccaggatacctgaatccctccagtaggactgaaatcctgcatttcatagacaatgcaaagagagcccaccagcttccgggacacttgactcaggagcacgatgctgtgctcagcctgtctgcgtacaacgtcaagctggcctggagggacggggaggatatcatcctcagggtgcccatccatgacatcgccgccgtctcctatgttcgggatgacgctgcacacctggtggtcctgaagacagcccaggacccagggatctcccccagccagagtctgtgtgcggaaagttccagaggcctcagtgcaggctccctgtcggagagtgcagttgggcccgtggaggcatgctgcctggtcatcctggctgcagagagcaaggtcgctgcggaggagctttgctgtctgctaggccaggtcttccaggttgtttacacggagtccaccatcgactttctggacagagcgatatttgatggggcctctaccccgacccaccacctgtccctgcacagcgatgactcttctacaaaagtggacattaaggagacctacgaggtggaagccagcactttctgcttccctgaatctgtggatgtgggtggtgcatcaccccacagcaagaccatcagtgagagcgagctgagcgccagcgccactgagctgctgcaggactacatgctgacgctgcgcaccaagctgtcatcacaggagatccagcagtttgcagcactgctgcacgagtaccgcaatggggcctctatccacgagttctgcatcaacctgcggcagctctacggggacagccgcaagttcctgctgcttggtctgaggcccttcatccctgagaaggacagccagcacttcgagaacttcctggagaccattggcgtgaaggatggccgcggcatcatcactgacagctttggcaggcaccggcgggccctgagcaccacatccagttccaccaccaatgggaacagggccacgggcagctctgatgaccggtcggcaccctcagagggggatgagtgggaccgcatgatctcggacatcagcagcgacattgaggcgctgggctgcagcatggaccaggactcagcatgatggacagtggatgggggggcacccacaccttccgcgcagtcgtcataggccttcccagaaggagctgcccagacctgcgtgtcagcccttggtggtggccagggagaggcgcccggtgcagatggccccgggcggcccaggtcctctactgtgaaggagcagggagctgccgagggacacgagcctcagtgcggggtggaaggctctttgccttgtccaccagggctcagccaagccctgcagtgtgtccccgctcggggagggcccggccgagcgggcagggagagccagtcctgtcggctgggcccttggacggctgtcagttttgcacatgatgttcctattgtaactctcagagaccttaaaaagaagtttactgcaatgtgaataatttaaaaaaaaaaaaaaaaaa

SEQ ID NO: 543 - DNA, 464 bp, Homo sapiens
tggatctctctccggtcgcgcacgcgaggccagtagggagagaagatggtggttctccgcagcagcttggagctgacaaccactccgcggcctcggcacgggctccttggacctgtccagtgacttcctcagtctggagcacatcggccggaggcgtccgctcggccggctgcggcgcagaagaaacccgcggcgaccacagccaaagcgggcgatgggtcatcagttaaggaagttgaaacctaccaccggacacgtgctttaagatctttgagaaaagatgcacagaattcttcagattctagttttgagaagaatgtggaaataacggagcaacttgctaatggcaggcgttttgcaaggcagttggccagacagcaggctgataaaaaaaaagaagagcacagagaagacaaagttgattccagttactcggtcattgagggctagaaacatcgttcgga

SEQ ID NO: 544 - DNA, 677 bp, Homo sapiens
  misc_feature (1)..(677): n = a, t, g, or c
tcagacaggaactgtttttattccaaccacctcacctccttaaatgggaggcgaacagtgaaatagtgcatttatcttaaaagtgaaataattccaggatggtagggcgagaccctgtgatgggtgaatttacctcacttgataccaagggcccttaatactcggggaagtgggactttgtcgacaaagccaggacaatccccctacccccaccccacccagcagtgattaaaaacccgtacggtcactttctatgtgatggctgtctccctctcaccagactgcatagcggttgcagatgaacatttggcacctagatgggggacaaggagctggggctgtgattcagggaagatgctgagggggactgggagtctctgtttgaatcttgaagcaaggggtgaaggtgtggggtgtgtgtangggagccgacacctgagtctttaggaaacaaatggtaagggttcggtggtgtgtgtctattactgtgctaacgccgctcaaaattgcctgaaacgtgtgctaacatggcgctncgagggcggactagggaggtatatgcggcgtgactcgntgggaaaccgangcgaaaagagatcggtacaangtgcgcatangtgacgctaaacgctgggtanaccnggcgagtaaaagcgtgctatcgtgtgctgatagtg

SEQ ID NO: 545 - DNA, 455 bp, Homo sapiens
gcctctgccctgttcctggcgcctttgccctgctcccgacggagaggagcgggctcgcgggagcgcccagcggctcacagcctgctcgcgcctcctcgcaccttccccgtggcccgcagagcccgtccgcggcgacgcgcacggccggggctggagtcccggggtggggatcgctgcgcccggccagccccctccgcgatttccaaagaaaaccgaacgcccgctagggccacgctcccgcggggaaaacctgtagagaagaggtcgctgtcactcaaggtgtgtgcgcgtcgccgaccggggcgagctcagcccctggcgcgccgtcgtcagcctgcatttcaccggcccctgctgcgccagcccaaaggaatagcagcagttctttgtttgatattaagaagaaaaaaaaaatctcttctaaagaacagaatttcaaaacagtctaaaacact

SEQ ID NO: 546 - DNA, 2571 bp, Homo sapiens
cttggctgttcctgaggcctggcctggctccccgctgaccccttcccagacctgggatggcggaggccggcctgaggggctggctgctgtgggccctgctcctgcgcttggcccagagtgagccttacacaaccatccaccagcctggctactgcgccttctatgacgaatgtgggaagaacccagagctgtctggaagcctcatgacactctccaacgtgtcctgcctgtccaacacgccggcccgcaagatcacaggtgatcacctgatcctattacagaagatctgcccccgcctctacaccggccccaacacccaagcctgctgctccgccaagcagctggtatcactggaagcgagtctgtcgatcaccaaggccctcctcacccgctgcccagcctgctctgacaattttgtgaacctgcactgccacaacacgtgcagccccaatcagagcctcttcatcaatgtgacccgcgtggcccagctaggggctggacaactcccagctgtggtggcctatgaggccttctaccagcatagctttgccgagcagagctatgactcctgcagccgtgtgcgcgtccctgcagctgccacgctggctgtgggcaccatgtgtggcgtgtatggctctgccctttgcaatgcccagcgctggctcaacttccagggagacacaggcaatggtctggccccactggacatcaccttccacctcttggagcctggccaggccgtggggagtgggattcagcctctgaatgagggggttgcacgttgcaatgagtcccaaggtgacgacgtggcgacctgctcctgccaagactgtgctgcatcctgtcctgccatagcccgcccccaggccctcgactccaccttctacctgggccagatgccgggcagtctggtcctcatcatcatcctctgctctgtcttcgctgtggtcaccatcctgcttgtgggattccgtgtggcccccgccagggacaaaagcaagatggtggaccccaagaagggcaccagcctctctgacaagctcagcttctccacccacaccctccttggccagttcttccagggctggggcacgtgggtggcttcgtggcctctgaccatcttggtgctatctgtcatcccggtggtggccttggcagcgggcctggtctttacagaactcactacggaccccgtggagctgtggtcggcccccaacagccaagcccggagtgagaaagctttccatgaccagcatttcggccccttcttccgaaccaaccaggtgatcctgacggctcctaaccggtccagctacaggtatgactctctgctgctggggcccaagaacttcagcggaatcctggacctggacttgctgctggagctgctagagctgcaggagaggctgcggcacctccaggtatggtcgcccgaagcacagcgcaacatctccctgcaggacatctgctacgcccccctcaatccggacaataccagtctctacgactgctgcatcaacagcctcctgcagtatttccagaacaaccgcacgctcctgctgctcacagccaaccagacactgatggggcagacctcccaagtcgactggaaggaccattttctgtactgtgccaatgccccgctcaccttcaaggatggcacagccctggccctgagctgcatggctgactacggggcccctgtcttccccttccttgccattggggggtacaaaggaaaggactattctgaggcagaggccctgatcatgacgttctccctcaacaattaccctgccggggacccccgtctggcccaggccaagctgtgggaggaggccttcttagaggaaatgcgagccttccagcgtcggatggctggcatgttccaggtcacgttcatggctgagcgctctctggaagacgagatcaatcgcaccacagctgaagacctgcccatctttgccaccagctacattgtcatattcctgtacatctctctggccctgggcagctattccagctggagccgagtgatggtggactccaaggccacgctgggcctcggcggggtggccgtggtcctgggagcagtcatggctgccatgggcttcttctcctacttgggtatccgctcctccctggtcatcctgcaagtggttcctttcctggtgctgtccgtgggggctgataacatcttcatctttgttctcgagtaccaggggccctgacccccatgccagctgtgcggacctttgccctgacctctggccttgcagtgatccttgacttcctcctgcagatgtcagcctttgtggccctgctctccctggacagcaagaggcaggaggtaggggcagctgggccagtactgagggacctgcccctgggttcccaccatggcagggagatggggtggctttaccaccacagagatggcccagagaatggggtgggggacaggggcattgtgccaggagagtaatatttaggccatgtattctccaatttcctacagaaaaataaatttgttttgacaattttttaaatataaaaaaaaaaaaaaaaaaa

SEQ ID NO: 547 - DNA, 5033 bp, Homo sapiens
acgagattatgaagtaatggttgctactttggacacacagattgcagatgatgctgagttacagaaatattcaaagctgctgcctattcacactctgaggcttggtgtggaagtggattcctttgatgggcaccattatatttcttcaattgtttctggtggtcctgttgatacattgggtctcctacagccagaagatgagctgcttgaggtcaatggcatgcagctttatggaaaatctcgccgagaagcagtctcctttcttaaagaagtgccacccccttttactttggtttgctgtcggaggttgtttgatgatgaagcttctgtagatgaaccaaggcgcactgaaacctctcttcctgagacagaggttgaccacaatatggatgtcaatactgaagaagatgatgatggggaattagcactgtggtcccctgaagtcaagattgttgaactagtaaaagattgtaaaggtttgggattcagcattttggattaccaggaccctttagatcctacaagatcagtgattgtgatccgctccctggtagcagatggtgtagcagaaagaagtgggggactattacctggagaccgcctggtctcagtcaatgaatactgtttggacaacacctcacttgctgaagctgtggaaatattgaaagctgtgccaccaggcctagtacaccttggcatctgtaagcctttggtggaagataatgaagaagaaagttgttatattttacattcaagcagtaatgaagacaagactgaattttcaggaacaattcatgatataaattcatctttaatactcgaagcacccaagggatttagagatgaaccatattttaaagaagaacttgtggatgaaccatttctagatctgggaaagtctttccattcccaacaaaaagagatagagcaaagcaaggaggcctgggagatgcatgaatttctgactcctagattgcaggaaatggatgaagaaagagaaatgcttgttgatgaagaatatgagttatatcaagatccctcaccatccatggagttgtatcccttgtcgcacattcaagaggccactcctgtgccctctgtgaatgaacttcactttggtacacagtggttgcatgataatgaaccatccgagtctcaagaggcaagaaccgggaggactgtctattcccaggaggcacagccgtatggctattgccctgaaaatgtgatgaaagaaaattttgtcatggagtccctaccatctgtaccatcaactgaaggaaacagtcaacaaggcagatttgacgacctggaaaatcttaattcattagcaaaaactagtctggatttaggcatgatcccgaatgatgtccaaggtcctagcttgctcattgaccttcctgttgtggctcaaaggagggagcaagaagatttgcctttatatcaacaccaagcgacacgagttatttccaaggcctcagcatacacaggaatgttgtcttctagatatgccactgatacatgtgagttacctgagagagaagaaggcgaaggagaagaaactccaaattttagccactggggtccaccgagaattgttgagatttttagagaacccaatgtgtctcttgggatcagtattgttggtggacaaactgttataaaacgtctaaagaatggagaggagcttaaaggtatattcatcaaacaagttttagaagacagtccagcagggaagacgaacgcacttaaaactggagataaaatacttgaggtgtctggagtagatttgcagaatgcctcacacagcgaagcagttgaggccattaagaatgcaggaaaccctgtggtgttcattgttcagagtttgtcatccactccacgagtcattcctaacgtacataacaaggccaacaaaatcaccggtaaccagaaccaggacacccaagaaaagaaagaaaagaggcaaggaactgctccaccgccaatgaaacttcctcctccttataaagctctgactgatgacagtgatgaaaatgaagaagaagatgcctttaccgaccaaaaaatcagacaaagatatgcagatctgcctggagaactgcacattattgaacttgaaaaagataagaatggacttggactcagccttgctggtaataaagaccgatcacgcatgagcatatttgtggtgggaattaacccggaaggacctgctgccgcagatggacgaatgcatattggagatgaactcttagagataaacaatcagattctgtatggaagaagtcaccaaaatgcatctgccattattaagactgccccatcaaaggtcaagctggttttcatcagaaacgaggatgcagtcaatcagatggccgttactccctttccagtgccatcaagttctccatcttctattgaggatcagagcggcaccgaacctattagtagtgaggaagatggcagcctcgaagttggtattaaacaattgcctgaaagtgaaagcttcaaactggctgtcagccagatgaaacagcaaaaatatccaacaaaagtctccttcagttcacaagagataccattagcaccagcttcatcataccattcaacagatgcagacttcacaggctatggtggtttccaggctcctctgtcagtggaccccgcaacgtgtcccattgtccctggacaggaaatgattatagaaatatccaagggacgttcagggcttggtctcagcattgtgggaggaaaagacacacccttgaatgctatagttatccatgaagtctatgaagaaggggcagcagccagagatggaagactttgggctggtgaccagatattagaggttaatggggttgacctgaggaactccagccacgaagaagccatcacagccctgaggcagaccccccagaaggtgcggctggtggtgtatagagatgaagcacactaccgggatgaggagaacttggagattttccctgtggatctgcagaagaaagctggccggggcctgggcctgagcatcgttgggaaacgaaatggaagcggagtgtttatttctgacatcgtgaaaggcggagccgcagacctggatgggagattgattcagggagatcagatcttatctgtgaatggggaggacatgagaaatgcctcacaggagacagtggccaccatcctcaagtgtgcacagggacttgtgcagctagagattggaagactccgagctggttcctggacctccgcaaggacgacatcacagaacagtcagtcagcagagtgcacacagcagctgtcatccctccttcgctcctgtcatcactggcctgcaaaacctggttggcacaaaaagagtttcagatccttcccagaaaaattcaggcacagatatggaaccaaggactgttgagataaacagggagctcagtgatgcccttggaatcagtattgctggaggaagaggaagtcccttaggagatatccccgtatttattgccatgattcaggctagcggagtggccgcacggacacagaagcttaaagttggagatcggattgtcagcattaacgggcaacctttggatgggctgtctcacgcggatgtggttaatctgctgaagaatgcctacgggcgcattatcctgcaggttgtagcagataccaatataagcgccatagcagctcagcttgaaaacatgtctacaggctaccaccttggttcgcccactgctgaacaccatccagaagacacagaaacacctccacctaagattattactttggagaaaggctctgaaggcttggggtttagtattgtagggggttatggaagtccccatggagacctgccaatttatgtcaagactgtatttgcaaagggagcagctgcagatgacggccgattaaaacgaggggatcagattttagctgttaatggcgagaccctggaaggtgttactcatgagcaagcagtcgccattctaaaacaccagagagggactgtaaccttaactgtgctgtcatgagcctcgggcctgatcacaagatagatgttgttgtttagaatatccacaggcagatgaagttctgagtgggtatgaaaagcaccctcaactaaaatgcaccttcattcttatttcttgccctctctgctcaggagaaatggctgaggtttcatgtgaatttcccaaatcaacaatcatctcctaatgtttcccagttcctgtcacctgttggcgaggttgatttctaaaacttaaatgagtctacctgttttgcatttaatttcagtgttccgatttcttttttttttttttttttttttgagacggagtctcactctgtcacccaggctgggttgcagtgagccaagttcgtgccactccactccagcctgggtgacagagcaagactctgtctcgaaaaagaaaaaaaaccatgaaggatgagtactagagtcagtaatagaagtagttcagcattatttaactacaacacaatgctgcaaatatttcacagtaattatcaaaatttaatgggctctaatttaaaatgttatttaataagtatagattttaattgagaattatctttgagtagatgtaatcacaaagtgcattaactcttgttggaatattttatggctattccaaagtatagagtgcctaaattttgtgttgaaaatgtctttcatgacggtattaagttttctgaaattacacatggcttttaaaatttctaatgtatccaagatgtgcaatgttgttaggatctcattcttcagtgcatgaaaarctactaccctcagaacattttgtgttaattgtacctgcaagaacacctcaggcaagccaagaagaaatgaaacccaaataaaacttgaaaatgcaccttaaaaatatatatacatataatagttttgaaatgggattctgctttattttgatggaatggccattaaatacacattttgagataaaaaaaaaaaaaaaaaaaaaaaaaaaaaaaaaaaaaaaaaaaaa

SEQ ID NO: 548 - DNA, 607 bp, Homo sapiens
ttttttttttcaaccatcaatggcattttattgtggaagtttctatgtattacataggtattaacttccttcctctcctgctcctccccacaaaatccagaaagttatttttatacataaacaactgaacatataaaaatcttggacctaatttctctaaagtcttgggttaaaagaacttgagtggcgcttctcctttctgagagtactacttctcaaggaggattcatggtctgtcctttgctcactacagatttctcctcttctctgggaaaaaatggtcaatgcttctgcttccttttaataaactaatttcttgattattatacattattattattccccacttgacaccttcttagaaacttgattgttggatgtgtttttcatttggcaaaaattcaatgtggctttgcgtgggatgtctgaagtgtcagaaacagcactgttgatgttctggttttgagagggaaaatatatatagagatggatacattccctagaagagcaatggtaaagactgaaaagggcgttcacaagttagaaggctgacagacctactgggttgaatctgtgctgtcacctcaaggtgcttttaggccgataa

SEQ ID NO: 549 - DNA, 828 bp, Homo sapiens; identical to SEQ ID NO: 91
  misc_feature (1)..(828): n = a, t, g, or c

SEQ ID NO: 550 - DNA, 758 bp, Homo sapiens
gtagttttggcacttttacttgttttttttaaagaaagtgaatacaaatatctttgtacacaaattctcattctggagaaacaggatgtagaattcaaaggtgccaacatctcccttcttaaaaataacattgaaacgggtaactgtacctgttaaatatcctggttggcaacttttaaaatctggcttccacctaactccacaaatttgacaaagttatttttgtttgtgtaagtgatactggttatccacttccagtacatgtaccatttggccagaggtccataaataatattaacattttcagtgtagaaatcttgaagttctaaagggaaatattgctcaatagataaattctcctggaatttcttgtagcaaaggttcctcaaatttaaatcgtttggaaatggccttttgctccattttctctttttcagactgtctgcattgtcctagagtatatgaagtaactacaattaactcttcggttacaatggattcctcggtttctgatttgtcggtatccgaattaatttcaggcacagaatgaccttcttggagggcatttgcttcttctagtgccctttccatcctgaaagaaggctcttgaatactgctctgtgtcaacccagggtgctttagacattcttcaacagtggctcgatcctcagtgtcttaactaaaagtgtcctgatgaaatcgacagccgactcagacaaacatcaaatcttgcctagaatacttaaattcatctgtga

SEQ ID NO: 551 - DNA, 655 bp, Homo sapiens
gtgctctaagctgcagcaagagaaactgtgtgtgaggggaagaggcctgtttcgctgtcgggtctctagttcttgcacgctctttaagagtctgcactggaggaactcctgccattaccagctcccttcttgcagaagggagggggaaacatacatttattcatgccagtctgttgcatgcaggcttttggcttcctaccttgcaacaaaataattgcaccaactccttagtgccgattccgcccacagagagtcctggagccacagtcttttttgctttgcattgtaggagagggactaagtgctagagactatgtcgctttcctgagctaccgagagcgctcgtgaactggaatcaactgctacaaaaaaaaaaaaaaaaaaaaaatttgtggggggccggcccgaaaaaattttaaaacacactcggttggggggggcgggcccccaatggaggtaacgtgcaacactgggcgcagaagggctggtgccaaaaggaggaacacgggggacagacaaagaggggcggggattcccccccaataaaaaaaaccgccgggggggagccgaggtgtctgagacaactccagaagggttctaggagcacaacgggtcacacaacgggagccaagcgaaggcagattaaattagccga

SEQ ID NO: 552 - DNA, 2804 bp, Homo sapiens
tcgcagagccgccgatgcgtgtccagtgacccggacagcaaggcccgcgcgcggcgggggcggcggcagacgcctggtcaccgtgaccccgattttggatttaccgcttgggggctggggggatcctggatttaactggcgactgttttgggggacgccggacgccatgttgtggaaaataaccgataatgtcaagtacgaagaggactgcgaggatcgccacgacgggagcagcaatgggaatccgcgggtcccccacctctcctccgccgggcagcacctctacagccccgcgccacccctctcccacactggagtcgccgaatatcagccgccaccctactttccccctccctaccagcagctggcctactcccagtcggccgacccctactcgcatctgggggaagcgtacgccgccgccatcaaccccctgcaccagccggcgcccacaggcagccagcagcaggcctggcccggccgccagagccaggagggagcggggctgccctcgcaccacgggcgcccggccggcctactgccccacctctccgggctggaggcgggcgcggtgagcgcccgcagggatgcctaccgccgctccgacctgctgctgccccacgcacacgccctggatgccgcgggcctggccgagaacctggggctccacgacatgcctcaccagatggacgaggtgcagaatgtcgacgaccagcacctgttgctgcacgatcagacagtcattcgcaaaggtcccatttccatgaccaagaaccctctgaacctcccctgtcagaaggagctggtgggggccgtaatgaaccccactgaggtcttctgctcagtccctggaagattgtcgctcctcagctctacgtctaaatacaaagtgacagtggctgaagtacagaggcgactgtccccacctgaatgcttaaatgcctcgttactgggaggtgttctcagaagagccaaatcgaaaaatggaggccggtccttgcgggagaagttggacaagatcgggttgaatcttccggccgggaggcggaaagccgctcatgtgactctcctgacatccttagtagaaggtgaagctgttcatttggctagggactttgcctatgtctgtgaagccgaatttcctagtaaaccagtggcagaatatttaaccagacctcatcttggaggacgaaatgagatggcagctaggaagaacatgctattggcggcccagcaactgtgtaaagaattcacagaacttctcagccaagaccggacaccccatgggaccagcaggctcgccccagtcttggagacgaacatacagaactgcttgtctcatttcagcctgattacccacgggtttggcagccaggccatctgtgccgcggtgtctgccctgcagaactacatcaaagaagccctgattgtcatagacaaatcctacatgaaccctggagaccagagtccagctgattctaacaaaaccctggagaaaatggagaaacacaggaaataaaattggaacgaagaaaggttaggagagtagggaaggaacaggactgcaaaaatccttctccaccgcacagactgggaacccctcctggcctgggggaagagtttgttacctaccttactatttaaagagccttcactggttctgcatcacccgcccctggacttcttagttgtttctctagcgctgagctatctcctaactttggacctattatcagaaggtgacaagtactggctctttattcattaagctttttttttttgaaccccattctttccttctctgaaagtggtgctataagttttagaatcttttaaatacattccctgggccaacagacccacacacttagccattgaaatgtcaaattgatgtgccctagatcaacagatcaacaataccttttttttcagtgttaaggtaatggttggtttttgtgtccgctaaatatttaccttgaaaaaaagaaaagtgtgtatctagcttcttcagagatcaagtcctctggtaggaggcaaaggttctatctgcttagcaactagttaataagtggtatctgacacactctaaaccccgtgttcaaacgggggccttctggttttaggaaacttgtagaaacgaagcctgctgattgatttttttctcctttttttttttttttttttttaactttgaaagttaactcttcaaatgggagactctttgaaatgacatgttcccttaaggtactgaagctttatttgcatatttatttcagatgtttcgagtaaacttgaaaagggtaggcacgaagcaatttgttgctgcttgtcacccccaagtccccgtggaggttctgtattttaagaaacagtgcgttgagtgtacagattttatttatgcgtaatttaatggggtctgtaaatactggtgcacttcttacgacttttttgagacatgggatccaattttaatattaacttttaatggtgatggggtaatctataacacatcataaggttttattcatatatatacagggtattaagaattaagaggatgctgggctctgttcttggcttggaagattctatttaattgaaactctctgttcagaaagcaataactttgtctcgttcctgttgggctgaaccctaaggtgagtgtgcagtacagtgtgtgtgggtgaaatggagatttggaattgaactctctgcctgtaaatgttccccaaataattgttgtgtgtatgatacgtgtataataaaagtattcttgttagaattgaaaaaaaaaaaaaaaaaaa

SEQ ID NO: 553 - DNA, 532 bp, Homo sapiens
  misc_feature (1)..(532): n = a, t, g, or c
gcactttttggaggaagtttattaaattaaaaaaaaaaactacaaatgagtaattataaaatataatttcactcttttcattatttaccacaaaaatttaaaaataccaatatacagacgagcacaagtgaactggaaaagagctaaaaattgtataaaagacaaatctaaactcaagaatatatgagaagtgacatacaccatacactctcaagtgagttcagaaagcatgttccgtgctgggcaggttttctttccaggtcagtttttattggcactacacctggaaagctctctaagccaaagttcttatgtgtcaggatcttcctagacctcccttggaaagcatttctcagaanacaactcacaccaggcaggctgacttattgtaggcacaaaaancataaatgcctctcataggccccatggagcttggaaaaaaaagatctggctaatgaaaagcattacaaaaacaganaagtgggcccctagtgggcncttagcagcttttctttatggcttctagggaatc

SEQ ID NO: 554 - DNA, 537 bp, Homo sapiens
ttttttttttgtgaaaaacatttattctgagaatctaaaatctggacaaagtactggactttagaaaaagcctacacaaaattgtctcattcttccctaatacattaataatctaagaataaggaggtgaaaaaaaccctttaaaaataacattgctccagtttgtctgcaggtatgtgatttaaaatatccctgttttattgaggtataggctgcaaactttggtaaaattagaaaaattaacaaaccctttcaaaagaaaaaaaatacaaaaacaaaaacaaccaaaccctaacgttatatctttcttggtacatatacagtaactacaaaaaaaattcatttagaaaatgtgttcattaagagaaaaaaaaaataaaaaaaaaccctcttgtaagttctcacttgctgagttaaaaaaattgaatgtaaatgatctataaggctcaaacggttcccaagcacccatccggtgtcaggaagaactggatgaccgcagtttctagaatctggttgacattttcaataattcagtgc

SEQ ID NO: 555 - DNA, 235 bp, Homo sapiens
ggttcattattaattataccaatcctttcatatatgtagaaaaaatgtttgagttggtcatctgtcttttattgaagatgcatttcaaatatcaaatatatttgaaagataaaatagcatctgtgaaattgaatattattttatgtgcgcttggctatgccctaaaatgtcagtttattgtccctaaagacgtatttattgatgtttaccaagaatagaagttggctgggcacaa

SEQ ID NO: 556 - DNA, 1466 bp, Homo sapiens
tgctctttgatttttgctattgtacggtttcatgcatttttttaaagggcatttgaggggaggattattgctatgaatgaaaaaaatattttagcttagactaagctacctgccttcaaaatagtttagggaccaccaccatattttattttgtttttatttttgaacatttttctaatgatttggagagaaaactatttacaaaaattccacatatcagtgatacaatttcttgctgtcaccaattttttataatagcagagtggcctgttctaagaaggccatattttttaagttatctttcagggtaacatggaaatactataaagttggatgtcaaactttaatatgttttcagtgttctctaattttttggaatttttgtagactttacacctggaaaaaaagatttgtaaaatcaccggaacaattgtgtgctttattttataggtagtggttattagtattacatccccattttaaaaacaaaaacataataatggttacaacacgtggagttttactaacatacatattaaatcaaagtatattcttaaaagtacttgtgaagtaaaatctttcttgtgcattttcaatacttgtaaactggaaatcagaaaatatttactatgaacaggaaaatctgacatatagccctttttgatatgtttattaataatgattcttaatggggctcataataagtttaatatgcacagcatcttagaaaagtttaacctgcaaacacttttaaaacataatgcctacttgatttatatctataaaaagactgacaggtaattatatttggaaaacatttaatgcactaactttaaagaaattgaaaattcaggtggataaatagtcttacaaaagacaatgtgctttatgttatacctatagctttggtcccatctttaattgagaaacatttatctgtataaaacatatttttggataaatatatatatatatatttgtatcgctacagaaaggctctaaaaagcatttgaggaaaatatttggttcccttttctataatcatcctttaagattcttatagctacatttggtttattcatcatatttacagtatatatattgttcttttcagtgttcacatcttgttccccatttctcacttgtgtcaccagctgtttgtgccatttttagtgtaaaagttgcagacctattagatctgcagtttaagttgccatgctgctaggaaattgtcctttttctttctagctgttaacctacttcctggaaaaagtagtagctctctgtagcattatggagtttcagtggaaccaaatttttgccattaaaaactggcattatactgaactatacattgagaaatcaatcaaaataaaaatttttactttcaaaaaaaaaaaaaaaaaaaaaaaaaaaaaaaaaaaaaaaaaaaaaaaaaaaaaaaaaaaaaaaaaaaaaaaaaaaaa

SEQ ID NO: 557 - DNA, 2828 bp, Homo sapiens; identical to SEQ ID NO: 84

SEQ ID NO: 558 - DNA, 503 bp, Homo sapiens; identical to SEQ ID NO: 442
  misc_feature (1)..(503): n = a, t, g, or c

SEQ ID NO: 559 - DNA, 2150 bp, Homo sapiens; identical to SEQ ID NO: 52

SEQ ID NO: 560 - DNA, 4181 bp, Homo sapiens; identical to SEQ ID NO: 445
  misc_feature (1)..(4181): n = a, t, g, or c

SEQ ID NO: 561 - DNA, 1836 bp, Homo sapiens; identical to SEQ ID NO: 7

SEQ ID NO: 562 - DNA, 831 bp, Homo sapiens
gttgacaagagacattccagcccaccacttcccaagtaaagaattaaaatgcagcatgatggctaaggcaagggcctgcagaagaatgtaaaggagggaggaagagcaggggattcagagcaggaaggaggagacagtactgtctatcccgcagacgtggtgctctttgaagggatcctggccttctactcccaggaaaggtacgagacctgttccagatgaagctttttgtggatacagatgcggacacccggctctcacgcagagtattaagggacatcagcgagagaggcagggatcttgagcagattttatctcagtacattacgttcgtcaagcctgcctttgaggaattctgcttgccaacaaagcagtatgctgatgtgatcatccctagaggtgcagataatctggtggccatcaacctcatcgagcagcacatccaggacatcctgaatggagggccctccaaacggcagaccaatggctgtctcaacggctacaccccttcacgcaagaggcaggcatcggagtccagcagcaggccgcattgacccgtctccatcggaccccagcccctatctccaagagacagaggaggcgtcaggaggcactgctcatctgtacatactgtttcctatgacattactgtatttaagaaaacaccatggagatgaaatgcctttgattttttttttctttttgtactttggaacgacaaaatgaaacagaacttgaccctgagcttaaataacaaaactgtgccaactactactggtgatgcctaattatgaatccaacgtgtaaccagtaataaatacatatatatat

SEQ ID NO: 563 - DNA, 976 bp, Homo sapiens; identical to SEQ ID NO: 480
  misc_feature (1)..(976): n = a, t, g, or c

SEQ ID NO: 564 - DNA, 756 bp, Homo sapiens; identical to SEQ ID NO: 449
  misc_feature (1)..(756): n = a, t, g, or c

SEQ ID NO: 565 - DNA, 6792 bp, Homo sapiens
ctccagtccgcatgctcagtagctgctgccggccgggctgcggggcggcgtccgctgcgcgcctacgggctgcggtggcggccgccgcggcacccggcagggcccgccagtccccgcttccctgctccagagccgccgcctgggccggggcagggcgggcccggggctcctccatgctgccagccgccgggctgcggagccgaccaagtggctcctgcgatggcggcggaagaggaggctgcggcgggaggtaaagtgttgagagaggagaaccagtgcattgctcctgtggtttccagccgcgtgagtccagggacaagaccaacagctatggggtctttcagctcacacatgacagagtttccacgaaaacgcaaaggaagtgattcagacccatcccaagtggaagatggtgaacaccaagttaaaatgaaggccttcagagaagctcatagccaaactgaaaagcggaggagagataaaatgaataacctgattgaagaactgtctgcaatgatccctcagtgcaaccccatggcgcgtaaactggacaaacttacagttttaagaatggctgttcaacacttgagatctttaaaaggcttgacaaattcttatgtgggaagtaattatagaccatcatttcttcaggataatgagctcagacatttaatccttaagactgcagaaggcttcttatttgtggttggatgtgaaagaggaaaaattctcttcgtttctaagtcagtctccaaaatacttaattatgatcaggctagtttgactggacaaagcttatttgacttcttacatccaaaagatgttgccaaagtaaaggaacaactttcttcttttgatatttcaccaagagaaaagctaatagatgccaaaactggtttgcaagttcacagtaatctccacgctggaaggacacgtgtgtattctggctcaagacgatcttttttctgtcggataaagagttgtaaaatctctgtcaaagaagagcatggatgcttacccaactcaaagaagaaagagcacagaaaattctatactatccattgcactggttacttgagaagctggcctccaaatattgttggaatggaagaagaaaggaacagtaagaaagacaacagtaattttacctgccttgtggccattggaagattacagccatatattgttccacagaacagtggagagattaatgtgaaaccaactgaatttataacccggtttgcagtgaatggaaaatttgtctatgtagatcaaagggcaacagcgattttaggatatctgcctcaggaacttttgggaacttcttgttatgaatattttcatcaagatgaccacaataatttgactgacaagcacaaagcagttctacagagtaaggagaaaatacttacagattcctacaaattcagagcaaaagatggctcttttgtaactttaaaaagccaatggtttagtttcacaaatccttggacaaaagaactggaatatattgtatctgtcaacactttagttttgggacatagtgagcctggagaagcatcatttttaccttgtagctctcaatcatcagaagaatcctctagacagtcctgtatgagtgtacctggaatgtctactggaacagtacttggtgctggtagtattggaacagatattgcaaatgaaattctggatttacagaggttacagtcttcttcataccttgatgattcgagtccaacaggtttaatgaaagatactcatactgtaaactgcaggagtatgtcaaataaggagttgtttccaccaagtccttctgaaatgggggagctagaggctaccaggcaaaaccagagtactgttgctgtccacagccatgagccactcctcagtgatggtgcacagttggatttcgatgccctatgtgacaatgatgacacagccatggctgcatttatgaattacttagaagcagaggggggcctgggagaccctggggacttcagtgacatccagtggaccctctagcctttgatttttaactccaaaaatgagaaacattttaaagcattatttacgaaaaaactgtctcaactattcttaagtactgtattgatattgtttgtatcttttattaatgttctaccactttttatagatttgcatcttcctgtcacagggatgtggggaaatacgttttcctcccaagagaaccaagtttattatagactcctttattcagtgaaatggcttataatccactagttgccatatttttgctaaaatatttctaaccaagaatactacttacatattgttttggctttgttttatttttgatgcagttttttttagttgaggtaatgtaatatattgatgttttcctttgtgtctaagattgatttataatagtaggtttgtataatttggaacattttccatgccttgcgaatttccttaattgaggatagggcttacacactttaagaaaacagtgagtacttgaacatttaaagggacagtgcaatttatagtcataatcacattgaatactgtatttgatctttggagacttaggcaagcacagagctgggatatttatgctcagttgagcactttaagatgaattttaagtgagatgatttcttgcttaaaactcagaaagtcaaaagagtttcagctttccttacagaaaaggaaggatcttgggccctagatcttggggattaacctctgcatataagatttactcttaataggccagacgtggtgctcacgcctgtaatcccagtactttgggaggctgagacgggcagatcacttgaggtcaggagttcaagaccagcctggccaatatggtgaaaccccgtttctactaaaaatacaaaaaaaattacccaggcactcactcttgaggtaactaaccaactcccacgataatgacagtccattcatgagcgcaaaggcctcatgacctaatggcacacacctgtaatcccaactgcttgggaggctgaggcgagaggattgcttgaacctgggaggcagaggttgcagtgagccgagatcgcaccactgcactccagtctgggcaacagagtgagacttcatctcaaaaaaagtaaaaaaaaagatttaatataatcactgaagatctctattatagatagattaggtttttgacattggaaacatacttagggatagatttgtcctaaaggaaaaaagtaggcccgggcagattaaatgtcttgtgtaaagtcacacattaaattcagtcacacattaaattcatagagttttaaatgtttaatgtatataaaccagtttctttatacacatttgggaaaacattggtctcacagattaaatgattaactaactgacccaggaactagttgtagctttctaagtaattaggcaattacagttattgcctgtaaccaaaggtaataaaacaaaatgacaagtacatgtttaaaattatgaggcaatgagaaataatttaaaaaccaattttctagttataatttaaaatttggagagcatttttaacagtaattaatccagaggtggctcaaattgagtataagaattaagattatttaaaatactgcatgtctaccttctcggggatcatactttataacactttctgcttcagtagctcttcatagcttgccaagtatgctcccatattttctctctcgtgcctcgcaaatgaaagtcagataggctgggaactcatggggcagccctcagacttcaatgtgggcttcaaatccagtttcctgttctatatggtgctacatctttccagaaaatttccctcagagcccctcgccaaaacaaagcattattttgaccctgcatgctatttctttagctgtaggtgatagattagaacttctgtcagacatgttaatgacaaacataccaacagacaataaccaaagcaaatgtttccttcaagtgtgaaatgtgcaggggctcgtgggcaaggatgtattggcacactgtcctcttgaactgatagtgtcccagcaatgttggaggttggcaccattcctggtccgacacttgaggacctgagagacatcaggtttagaatgagccaaagaaatcctacaagatggggagaattggtgtgcagcagcctaagtgttatagttaagtctaaagaagtatgaaagatcccctgtgttctctaaattgagcagaggggcctgcctaccaatatcactttttaggggactgaaccattgcaggttagacttggcttccaaagagtctgcctaagccaggggtggcagggtaggccatcatagctggatggcctcaaaagcagatgggggcagacttgccctcgtgatgccaggatttgagaggcagagtttctagagggagaccagtgctgcctctcacagtggcagttttttctctttgcaagaggaggggctgttcaattccatagaccagtgggcagatagccagttgaatactctgtgcatggtttgatcctttattagttcgctctaatatttttctgtagatccttttgtcctggactcaaaatctaatccatgcattgtatgataccgtagctctcctaaggtttgtgtttccttcaaaatgttttagttttcttcaactaaatttgatttttgctgttagaagtgacatatttttatggtatacactatgttccttttttctactgcgagtcaattttttgaattttcgtgagaaagaatatatctacaaattgcacgaaagtatcataaaaacagtactctagagcagcgctgtccaatagaaatataatctgagccacatgtataattttattttcttctagccacattaaagaagtaaaaagatacaagtagaactaattttaatgttttaattcagtatatccaaaatatcatttgaacatgtaattaatataaaattattaatgtgatattttacattcttttggtaatactagtcttcaaaatctggtatgtatcttacattgatagcacatctcactttgtactagccacattgcaagtgctcagtagccacatgtggctagtggctactgcactggacagcacagttctaggttccaccctaacacccaagtcctgtggattagaatcccagaatcagagctggaagtaaacatagagatcaaacctccttttaaaaatgaggacgctgaggcacagagtttaaatggcttgcatgaggtcatacagctaaattcagcctcaacagggtcttctgattccaggcactcttcccactccactacattactgtagtggtaattcttagggttaaaaaaagtgtagagtaggccgggcgcagtggctcatgcctgtaatcccagcactttgggaggccgaagtgggcggatcacgaggtcaggagatcgagaccatcctggccaacatggtgaaaccccgtctctactgaaaatacaaagcaaaattagccaggtgtggtggcgggcgcctgtggtcccagctgctctggaggctgaggcagaatggcgtgaacccaggaggcagagatggcagtgagccaagatcgcgccactgcaccccagcctgggcgacagagcgagactccatctcaaaaaaaaaaaaaaaaaaaaaagaaaagaaaagaaaagtctagagaacattatattaagtggttattattgaagtagaccaaagtttataccataaggatatttttccttaaataccatgtttgaagaacaattatttattgatccttgaatctgtaagatcaaataacaagtctctatccatgttaccaaatttaaccttttgaaaataataaactttaaaatatcagatgtgttattacaggatgatacttggaatcaagtgaaatgagttatatggtcatcactaaatttagaaatctattgtgaaacaaagacaaacaggaaagtacagaatagagacttttagtaaataaatggaatttaaaagaaagtgtttatttacagtgtcacgacagaaaaggatgtctttgttgtcatagtctttgagggatctccgtaaaatctggggcacaggtacaagaaatagccaatatttagttcccagaccatgtttagtagtgtccagtttcagatcatgctgccaagaggtatctccccctcaggtgggtcatcactgagccctggaattggagactcatacttgcccagcacaatgttacgggcagacaggccgacatctatgattagctagaagccataaagaaaagctgctaagtggccactaggtgccacttttctgtttttgtaatgctttcattagcagatcttttttttccaagctccatggggcctatgagaggcatttatgatttttgtgcctacaataagtcagcctgtctggtgtgagttgttttatgagaaatgctttccaagggaggtctaggaagatcctgacacataagaactttggcttagagagctttccaggtgtagtgccaataaaaactgacctggaaagaaaacctgcccagcacggaacatgctttctgaactcacttgagagtgtatggtgtatgtcacttctcatatattcttgagtttagatttgtcttttatacaatttttagctcttttccagttcacttgtgctcgtctgtatattggtatttttaaatttttgtggtaaataatgaaaagagtgaaattatattttataattactcatttgtagtttttttttttaatttaataaacttcctccaaaaagtgctcccttaaaa

SEQ ID NO: 566 - DNA, 358 bp, Homo sapiens
cgttcttcctcttctgggggtttgctcctgcatgccatcagacattccaagactctttgatgtttctctgagttgttgatatgggctctgacaagggtttctaattcattccacatgatacggtattgttcatctcttttagggccctttcctcttgtaccaactgtggaaataggtagaggatcattttttctttccatatcaactaagttgtatattgttttttgacagtttaacacatcttcttctgtcagagattctttcacaataacactggctaatggaactaccgcttgcatgttaaaaatggtggtttgtgaaatgatcataggccagtaacgggtatgtttttctaact

SEQ ID NO: 567 - DNA, 669 bp, Homo sapiens; identical to SEQ ID NO: 455

SEQ ID NO: 568 - DNA, 3323 bp, Homo sapiens; identical to SEQ ID NO: 461

SEQ ID NO: 569 - DNA, 2538 bp, Homo sapiens; identical to SEQ ID NO: 447

SEQ ID NO: 570 - DNA, 583 bp, Homo sapiens; identical to SEQ ID NO: 468

SEQ ID NO: 571 - DNA, 2328 bp, Homo sapiens
acgggtagtggtggtcgagatctttccggcaacaagaggaccgcggaacagtcttgtgatcagaaactcaccaacaccaacagggcgctggctctcaactgctttgctcccatcaatgaccaagaaggggccgaggccaaggactggcggtcggggaagccggtcagggtggtgcgcaatgtcaagggtggcaagaatagcaagtacgcccccgctgagggcaaccgctacgatggcatctacaaggttgtgaaatactggcccgagaaggggaagtccgggtttctcgtgtggcgctaccttctgcggagggacgatgatgagcctggcccttggacgaaggaggggaaggaccggatcaagaagctggggctgaccatgcagtatccagaaggctacctggaagccctggccaaccgagagcgagagaaggagaacagcaagagggaggaggaggagcagcaggaggggggctttgcgtcccccaggacgggcaagggcaagtggaagcggaagtcggcaggaggtggcccgagcagggccgggtccccgcgccggacatccaagaaaaccaaggtggagccctacagtctcacggcccagcagagcagcctcatcagagaggacaagagcaacgccaagctgtggaatgaggtcctggcgtcactcaaggaccggccggcgagcggcagcccgttccagttgttcctgagtaaagtggaggagacgttccagtgtatctgctgtcaggagctggtgttccggcccatcacgaccgtgtgccagcacaacgtgtgcaaggactgcctggacagatcctttcgggcacaggtgttcagctgccctgcctgccgctacgacctgggccgcagctatgccatgcaggtgaaccagcctctgcagaccgtcctcaaccagctcttccccggctacggcaatggccggtgatctccaagcacttctcgacaggcgttttgctgaaaacgtgtcggagggctcgttcatcggcactgattttgttcttagtgggcttaacttaaacaggtagtgtttcctccgttccctaaaaaggtttgtcttccttttttttttatttttatttttcaaatctatacattttcaggaatttatgtattctggctaaaagttggacttctcagtattgtgtttagttctttgaaaacataaaagcctgcaatttctcgacaaaacaacacaagattttttaaagatggaatcagaaactacgtggtgtggaggctgttgatgtttctggtgtcaagttctcagaagttgctgccaccaactctttaagaaggcgacaggatcagtccttctctcgggttctggcccccaaggtcagagcaagcatcttcctgacagcattttgtcatctaaagtccagtgacatggttccccgtggtggcccgtggcagcccgtggcatggcgtggctcagctgtctgttgaagttgttgcaaggaaaagaggaaacatctcgggcctagttcaaacctttgcctcaaagccatcccccaccagactgcttagcgtctgagatccgcgtgaaaagtcctctgcccacgagagcggggagttggggccacgcagaaatggcctcaaggggactctgctccacgtggggccaggcgtgtgactgacgctgtccgacgaaggcggccacggacggacgccagcacacgaagtcacgtgcaagtgcctttgattcgttccttctttctaaagacgacagtctttgttgttagcactgaattattgaaaatgtcaaccagattctagaaactgcggtcatccagttcttcctgacaccggatgggtgcttgggaaccgtttgagccttatagatcatttacattcaatttttttaactcagcaagtgagaacttacaagagggtttttttttattttttttttctcttaatgaacacattttctaaatgaattttttttgtagttactgtatatgtaccaagaaagatataacgttagggtttggttgtttttgtttttgtattttttttcttttgaaagggtttgttaatttttctaattttaccaaagtttgcagcctatacctcaataaaacagggatattttaaatcacatacctgcagacaaactggagcaatgttatttttaaagggtttttttcacctccttattcttagattattaatgtattagggaagaatgagacaattttgtgtaggctttttctaaagtccagtactttgtccagattttagattctcagaataaatgtttttcacagatagaaaaaaaaaaaaaaaaaaaaaaaaaaaaaaa

SEQ ID NO: 572 - DNA, 2454 bp, Homo sapiens; identical to SEQ ID NO: 452

SEQ ID NO: 573 - DNA, 1520 bp, Homo sapiens; identical to SEQ ID NO: 483

SEQ ID NO: 574 - DNA, 740 bp, Homo sapiens
ggtaggaacatggcggatcggctcacgcagcttcaggacgctgtgaattcgcttgcagatcagttttgtaatgccattggagtattgcagcaatgtggtcctcctgcctctttcaataatattcagacagcaattaacaaagaccagccagctaaccctacagaagagtatgcccagctttttgcagcactgattgcacgaacagcaaaagacattgatgttttgatagattccttacccagtgaagaatctacagctgctttacaggctgctagcttgtataagctagaagaagaaaaccatgaagctgctacatgtctggaggatgttgtttatcgaggagacatgcttctggagaagatacaaagcgcacttgctgatattgcacagtcacagctgaagacaagaagtggtacccatagccagtctcttccagactcatagcatcagtggataccatgtggctgagaaaagaactgtttgagtgccattaagaattctgcatcagacttagatacaagccttaccaacaattacagaaacattaaacaatatgacacattacctttttagctatttttaatagtcttctattttcactcttgataagcttataaaatcatgattgaatcagctttaaagcatcataccatcattttttaactgagtgaaattattaaggcatgtaatacattaatgaacataatataaggaaacatatgtaaaattcaaaaaaaaaa

SEQ ID NO: 575 - DNA, 507 bp, Homo sapiens; identical to SEQ ID NO: 451

SEQ ID NO: 576 - DNA, 518 bp, Homo sapiens; identical to SEQ ID NO: 448
  misc_feature (1)..(518): n = a, t, g, or c

SEQ ID NO: 577 - DNA, 653 bp, Homo sapiens; identical to SEQ ID NO: 465
  misc_feature (1)..(653): n = a, t, g, or c

SEQ ID NO: 578 - DNA, 678 bp, Homo sapiens; identical to SEQ ID NO: 459

SEQ ID NO: 579 - DNA, 436 bp, Homo sapiens
ttttttctttttctcagaaaaatgtatttgcaattcaaatgttcatataaaaagcataaattttaaaaagttcatagatgtgtttttagaagtgctatggttttgccattcactgcaattacattgcaaaatgtgcagggtggtccacactgcatcatcttatgcttttgtcacactgaagtcactctcatcacaacctcccccgagctgttatcttctgataagtcttcatggggcctcatccgattgaacaggtgcaataacacatagccacactgaaaccttggtgaggttaactgagttgggtggaccaagtttctgttccgcagagctgtcaatggtaaccacaaagtcctacttgtggaagactctccccggctgctttcttcgatgtctgtggctttgtcataatttaacacatcccagtgcaaattca

SEQ ID NO: 580 - DNA, 468 bp, Homo sapiens; identical to SEQ ID NO: 456
  misc_feature (1)..(468): n = a, t, g, or c

SEQ ID NO: 581 - DNA, 531 bp, Homo sapiens; identical to SEQ ID NO: 463

SEQ ID NO: 582 - DNA, 586 bp, Homo sapiens; identical to SEQ ID NO: 454

SEQ ID NO: 583 - DNA, 1649 bp, Homo sapiens
ccgtcctgtcctggctgctcgctctgcttcgctgcgccgccactatgctctccctccgtgtcccgctcgcgcccatcacggacccgcagcagctgcagctctcgccgctgaaggggctcagcttggtcgacaaggagaacacgccgccggccctgagcgggacccgcgtcctggccagcaagaccgcgaggaggatcttccaggagcccacggagccgaaaactaaagcagctgcccccggcgtggaggatgagccgctgctgagagaaaacccccgccgctttgtcatcttccccatcgagtaccatgatatctggcagatgtataagaaggcagaggcttccttttggaccgccgaggaggtggacctctccaaggacattcagcactgggaatccctgaaacccgaggagagatattttatatcccatgttctggctttctttgcagcaagcgatggcatagtaaatgaaaacttggtggagcgatttagccaagaagttcagattacagaagcccgctgtttctatggcttccaaattgccatggaaaacatacattctgaaatgtatagtcttcttattgacacttacataaaagatcccaaagaaagggaatttctcttcaatgccattgaaacgatgccttgtgtcaagaagaaggcagactgggccttgcgctggattggggacaaagaggctacctatggtgaacgtgttgtagcctttgctgcagtggaaggcattttcttttccggttcttttgcgtcgatattctggctcaagaaacgaggactgatgcctggcctcacattttctaatgaacttattagcagagatgagggtttacactgtgattttgcttgcctgatgttcaaacacctggtacacaaaccatcggaggagagagtaagagaaataattatcaatgctgttcggatagaacaggagttcctcactgaggccttgcctgtgaagctcattgggatgaattgcactctaatgaagcaatacattgagtttgtggcagacagacttatgctggaactgggttttagcaaggttttcagagtagagaacccatttgactttatggagaatatttcactggaaggaaagactaacttctttgagaagagagtaggcgagtatcagaggatgggagtgatgtcaagtccaacagagaattcttttaccttggatgctgacttctaaatgaactgaagatgtgcccttacttggctgattttttttttccatctcataagaaaaatcagctgaagtgttaccaactagccacaccatgaattgtccgtaatgttcattaacagcatctttaaaactgtgtagctacctcacaaccagtcctgtctgtttatagtgctggtagtatcaccttttgccagaaggcctggctggctgtgacttaccatagcagtgacaatggcagtcttggctttaaagtgaggggtgaccctttagtgagcttagcacagcgggattaaacagtcctttaaccagcacagccagttaaaagatgcagcctcactgcttcaacgcagattttaatgtttacttaaatataaacctggcactttacaaacaaataaacattgtttgtactcacaaaaaaaaaaaaaaaaaaaaaaa

SEQ ID NO: 584 - DNA, 497 bp, Homo sapiens; identical to SEQ ID NO: 470

SEQ ID NO: 585 - DNA, 591 bp, Homo sapiens; identical to SEQ ID NO: 476

SEQ ID NO: 586 - DNA, 775 bp, Homo sapiens
gattcaggtgtttagaggagctgcttttcattaggaccttggagagtcccctcagttttgacacccttgtttcaccacaagaaagcacccgacaccctgggttgcatacttactactcaggggctttccccccagctttcagagcactgaattattgtgagctggtgactccgcaggcctgagtggtattagagttgtggaatgttgttgcatacacgtttatgagttaaccactatttaaatgatgctgctttttaaagttttttcaaagtacaatagatttttgaagtttcaggtaactggaaaaatctttaacttttgctttaagtgtttggggcaggataaaacaacatagaaaatataaaacaatttttgctttgaaaaatacagtgcaggtgaccatttactgcttattctgtaatccttactgtctataattaacttcagtaacactgaaacttgatgaaaagttttacaaaattatttactgtagggacaaagttatatggaatgtttgtattttctatactatctgaatgcactgccaggtgaaagactgttaaagacagaacacactatttgtggagggaggatactaattgtttaacatttttcatcatttgtgagtgataaaaaagtttgtatagctttataataaatcctattttaaaaaaaaacaaaaaaaaaaaatgtttgggggggcgggcgaaaaatttttaaaccatttgttggcggggggccattggtttggaaatggtcccgggtccagaactgg

SEQ ID NO: 587 - DNA, 2219 bp, Homo sapiens
ggcacgagggccggcggctgcggagctggcaggtgcgaagcgtctgcacctggcgggcgatggcgcccgatgcgggcgccccgggatagcgtgggcgaggctgcggggccccggcgcgcacgcccgcacctctccccagccctggcgtgggcccagcccggcccaggcagcaatggggttcctgcagctgctggtcgtagcggtgctggcatccgaacaccgggtggctggtgcagccgaggtcttcgggaattccagcgagggtcttattgaattttctgtggggaaatttagatacttcgagctcaataggccctttccagaggaagctattttgcatgatatttcaagcaatgtgacttttcttattttccaaatacactcacagtatcagaatacaactgtttccttttctccgactctcctttccaattcctcggaaacaggcactgccagtggactggttttcatccttagaccagagcagagtacatgcacttggtacttggggacttcaggcatacagcctgtccagaatatggctatcctactctcctactcagaaagagatcctgtccctggaggctgtaatttggagttcgatttagatattgatcccaacatttacttggagtataatttctttgaaacgactatcaagtttgccccagcaaacctaggctatgcgagaggcgtagatcccccaccatgtgacgctgggacagaccaggactccaggtggaggttgcagtatgatgtctatcagtattttctgcctgagaatgacctcactgaggagatgttgctgaagcatctgcagaggatggtcagtgtgccccaggtgaaggccagtgctctcaaggtggttaccctaacagctaatgataagacaagtgtttccttctcctccctcccgggacaaggtgtcatatacaatgtcattgtttgggacccgtttctaaatacatctgctgcctacattcctgctcacacatacgcttgcagctttgaggcaggagagggtagttgtgcttccctaggaagagtgtcttccaaagtgttcttcactctttttgccctgcttggtttcttcatttgtttctttggacacagattctggaaaacagaattattcttcataggctttatcatcatgggattcttcttttatatactgattacaagactgacacctatcaagtatgatgtgaatctgattctgacagctgtcactggaagcgtcggtggaatgttcttggtagctgtgtggtggcgatttggaatcctctcgatctgcatgctctgtgttggactagtgctggggttcctcatctcgtcagtgactttctttactccactgggaaacctaaagatttttcatgatgatggtgtattctgggtcactttctcttgcatagctatcctcattccagtagttttcatgggctgcctaagaatactgaacatactgacttgtggagtcattggctcctattcggtggttttagccattgacagttactggtccacaagcctttcctacatcactttgaacgtactcaagagagcgctcaacaaggatttccacagagctttcacaaatgtgccttttcaaactaatgacttcattatcctggcagtatggggcatgctggctgtaagtggaattacgttacagattcgaagagagagaggacgaccgttcttccctccccacccatacaagttatggaagcaagagagagagcgccgagtgacaaacattctggaccctagctaccacattcctccattgagagagaggctctatggccgattaacccagattaaagggctcttccagaaggagcagccagctggagagagaacgcctttgcttctgtagatgcccaggggcttggtcagtgtgcctcagctttggagttcatgcctggagtggttcaacagtctctggtgcaagtctaataagagatcaggcatatatatctgttctttgcataatattatggtgcccttattgatatatggtaagggtgtactaggggattaggatgattgtaagagaatgagaaagatgaccaaaaggttggtggtagggaggctttttcttatttccaaatacttgagaaattaccttttggtttacaaatctatgatcaacttattccattaaatagatacattaaaaaaattaaaaactgaaaaaaaaaaaaaaaaaa

SEQ ID NO: 588 - DNA, 368 bp, Homo sapiens
ttttttttttttttttttgggagtaacagctgcttttattaacatcagaagggcaacagtacaggaagttgggtagatgtggggacaacagagagactgtggcagaggcaggactgcagatctatggaaattgcctggaagagtcagctgtaagggatgagaatcctgagggtaaaagagaaaagggaaagactcctctttgatcttatgaagctgaaataacaagatcttaaacatgagtgagaatctgttgccccaacctaaggtgactttaaatccaaggtaaaaaacacggcatgggtattagtttgaatagggaaaatgagaactctctttgagctcaaaaaaaaaaaaaaaaaaaaaaaatg

SEQ ID NO: 589 - DNA, 581 bp, Homo sapiens; identical to SEQ ID NO: 467
  misc_feature (1)..(581): n = a, t, g, or c

SEQ ID NO: 590 - DNA, 663 bp, Homo sapiens; identical to SEQ ID NO: 471
  misc_feature (1)..(663): n = a, t, g, or c

SEQ ID NO: 591 - DNA, 2046 bp, Homo sapiens; identical to SEQ ID NO: 479

SEQ ID NO: 592 - DNA, 556 bp, Homo sapiens; identical to SEQ ID NO: 472
  misc_feature (1)..(556): n = a, t, g, or c

SEQ ID NO: 593 - DNA, 630 bp, Homo sapiens; identical to SEQ ID NO: 475
  misc_feature (1)..(630): n = a, t, g, or c

SEQ ID NO: 594 - DNA, 3138 bp, Homo sapiens
ctttctccctagggtggcgtgggttgcatccctcggaagagcgaaggaatgagccaggtcggggggcggggagacaggtgcacacaggaggtccagggcttggtccatggggctggtgacctttctgcttcccttgcagaaaactctcccaccatgtcgcagaatggatacttcgaggattcaagctactacaagtgtgacacagatgacaccttcgaagcccgagaggagatcctgggggatgaggccttcgacactgccaactcctccatcgtgtctggcgagagtatccgtttttttgtcaatgtcaaccttgagatgcaggccaccaacactgagaatgaagcgacttccggtggctgtgtgctcctgcacacctcccgaaagtacctgaagttaaagaacttcaaggaagagatccgtgcgcaccgcgacctagatggcttcctggcgcaggccagcatcgtcctgaacgagacggccacctccctggataacgtgctgcggaccatgcttcgccgcttcgccagggaccctgacaacaatgagcccaactgcaacctggacctgctcatggccatgctcttcaccgatgccggggcacccatgcggggtaaagtccacctgctgtcagataccatccaaggggtcaccgccacagtgacaggggtgcggtaccagcagtcgtggctctgcatcatctgtaccatgaaggccctacagaagcggcacgtgtgcatcagccgcctggttcgcccacagaactggggggagaattcctgtgaggttcggttcgtcatcctggtgctggccccacccaagatgaaaagcactaagactgcgatggaggtggcgcgcacgtttgccaccatgttctcggatatcgccttccgccagaagctcctggagacccgcacagaggaggaattcaaggaggccttggtgcatcagagacagctgctcaccatggtgagccacggtccagtggcgccgagaacgaaggaacgcagcacagtctccctccctgcccacagacacccagagcccccaaagtgcaaggactttgtcccttttgggaagggcatccgggaggacatcgcacgcaggttccccttgtaccccttggacttcactgatggcattattgggaaaaacaaggctgtgggcaaatacatcaccaccaccctgttcctctacttcgcctgcctcctgcccaccatcgctttcgggtctctcaatgacgagaacacagacggggccatcgacgtgcagaagaccatagccgggcagagcatcgggggcctgctctacgcgctcttctctgggcagccattggtgattctgctgaccaccgcgcccctggcgctctacatccaggtgattcgtgtcatctgtgatgactatgacctggacttcaactccttctacgcatggacgggcctgtggaatagtttcttccttgcgctttatgcctttttcaacctcagcctggtcatgagtctcttcaagaggtcgacggaggagatcatcgccctcttcatttccatcacgtttgtgctggatgccgtcaagggcacggttaaaatcttctggaagtactactatgggcattacttggacgactatcacacaaaaaggacttcatcccttgtcagcctgtcaggcctcggcgccagcctcaacgccagcctccacactgccctcaacgccagcttcctcgccagccccacggagctgccctcggccacacactcaggccaggcgaccgccgtgctcagcctcctcatcatgctgggcacgctctggctgggctacaccctctaccaattcaagaagagcccctacctgcacccctgcgtgcgagagatcctgtccgactgcgccctgcccatcgcggtgctcgccttctccctcatcagctcccatggcttccgggaaatcgagatgagcaagttccgctacaaccccagcgagagcccctttgcgatggcgcagatccagtcgctgtccctgagggccgtcagcggtgccatgggcctcggcttcctgctgtccatgctcttcttcatcgagcagaacttggtggccgccttggtgaatgcaccggagaacaggctggtgaagggcactgcctaccactgggacctcctgctcctcgccatcatcaacacagggctgtctctgtttgggctgccttggatccatgccgcctacccccactccccgctgcacgtgcgagccctggccttagtggaggagcgtgtggagaacggacacatctatgacacgattgtgaacgtgaaggagacgcggctgacctcgctgggcgccagcgtcctggtgggcctgtccctgttgctgctgccggtcccgcttcagtggatccccaagcccgtgctctatggcctcttcctctacatcgcgctcacctccctcgatggcaaccagctcgtccagcgcgtggccctgctgctcaaggagcagactgcgtaccccccgacacactacatccggagggtgccccagaggaagatccactacttcacgggcctgcaggtgcttcagctgctgctgctgtgtgccttcggcatgagctccctgccctacatgaagatgatctttcccctcatcatgatcgccatgatccccatccgctatatcctgctgccccgaatcattgaagccaagtacttggatgtcatggacgctgagcacaggccttgactggcagaccctgcccacgccccattcgccagccctccacgtcctcccaggctggctctggagctgtgaggggaggtgtaggtgtgtgggtgactgctctgtgctgcgccttctcatggctgactcaggcctggggcatctgggcattgtaggggtgcagtggtatgtgcccacccctctcccattatcctttagctttaggccaagagcgttgctcagggcagcttctgcccagggtgggtgggactgagcaggatggattttcttttgataaaagagtcgatgcctgaaagagaaaccatttccttgattgtgtaaggaacttgctggacgcacattaaagaataaagctcctgtttctaggctcctaaaaaaaaaaaaaaaaaaaaaaaaaaaaaaaaaaaaaaaaaaaaa

SEQ ID NO: 595 - DNA, 535 bp, Homo sapiens; identical to SEQ ID NO: 462

SEQ ID NO: 596 - DNA, 775 bp, Homo sapiens; identical to SEQ ID NO: 453
  misc_feature (1)..(775): n = a, t, g, or c

SEQ ID NO: 597 - DNA, 574 bp, Homo sapiens; identical to SEQ ID NO: 484
  misc_feature (1)..(574): n = a, t, g, or c

SEQ ID NO: 598 - DNA, 518 bp, Homo sapiens; identical to SEQ ID NO: 457

SEQ ID NO: 599 - DNA, 399 bp, Homo sapiens; identical to SEQ ID NO: 482

SEQ ID NO: 600 - DNA, 809 bp, Homo sapiens; identical to SEQ ID NO: 473

SEQ ID NO: 601 - DNA, 528 bp, Homo sapiens; identical to SEQ ID NO: 469

SEQ ID NO: 602 - DNA, 4856 bp, Homo sapiens; identical to SEQ ID NO: 450

SEQ ID NO: 603 - DNA, 435 bp, Homo sapiens; identical to SEQ ID NO: 464

SEQ ID NO: 604 - DNA, 528 bp, Homo sapiens; identical to SEQ ID NO: 460
  misc_feature (1)..(528): n = a, t, g, or c

SEQ ID NO: 605 - DNA, 529 bp, Homo sapiens; identical to SEQ ID NO: 481
  misc_feature (1)..(529): n = a, t, g, or c

SEQ ID NO: 606 - DNA, 543 bp, Homo sapiens
  misc_feature (1)..(543): n = a, t, g, or c
gaacttcctatgataaaaccatctacacttttctaagtaggaaaaataagggaatgagtgtcatgtttttaaaaatttggggaaagatcaagagtacagaanagcatggggcaaaaaanaagtttaggtgcatttaggtgacatcaataaagcccagttcttttttttttttgacaaatgggatcatcctataaacattgttaggcaaattacaaaatctatctgcgctgtccctagttgggcncaacatgcnccatggcaatctgtcttgctgctgtgcagtccttccctgggtggctgcaggggcaaacacagggtttgtnggtcctgggtcttataaaaatcaggtacaaattgacacntntatttaaaagganaaattgccaaatganacaaaatgttttccttatgcaaatttcataatataaattatanacactgccagtgcactgttangaccccncgggcttggaagggctcnatattattgggtttacaataanattgggccnagttaatntccaaaaattactccccccnttc

SEQ ID NO: 607 - DNA, 1593 bp, Homo sapiens
ccggcgcagcgcggccgcagcagcctccgccccccgcacggtgtgagcgcccgccgcggccgaggcggccggagtcccgagctagccccggcggccgccgccgcccagaccggacgacaggccacctcgtcggcgtccgcccgagtccccgcctcgccgccaacgccacaaccaccgcgcacggccccctgactccgtccagtattgatcgggagagccggagcgagctcttcggggagcagcgatgcgaccctccgggacggccggggcagcgctcctggcgctgctggctgcgctctgcccggcgagtcgggctctggaggaaaagaaagtttgccaaggcacgagtaacaagctcacgcagttgggcacttttgaagatcattttctcagcctccagaggatgttcaataactgtgaggtggtccttgggaatttggaaattacctatgtgcagaggaattatgatctttccttcttaaagaccatccaggaggtggctggttatgtcctcattgccctcaacacagtggagcgaattcctttggaaaacctgcagatcatcagaggaaatatgtactacgaaaattcctatgccttagcagtcttatctaactatgatgcaaataaaaccggactgaaggagctgcccatgagaaatttacaggaaatcctgcatggcgccgtgcggttcagcaacaaccctgccctgtgcaatgtggagagcatccagtggcgggacatagtcagcagtgactttctcagcaacatgtcgatggacttccagaaccacctgggcagctgccaaaagtgtgatccaagctgtcccaatgggagctgctggggtgcaggagaggagaactgccagaaactgaccaaaatcatctgtgcccagcagtgctccgggcgctgccgtggcaagtcccccagtgactgctgccacaaccagtgtgctgcaggctgcacaggcccccgggagagcgactgcctggtctgccgcaaattccgagacgaagccacgtgcaaggacacctgccccccactcatgctctacaaccccaccacgtaccagatggatgtgaaccccgagggcaaatacagctttggtgccacctgcgtgaagaagtgtccccgtaattatgtggtgacagatcacggctcgtgcgtccgagcctgtggggccgacagctatgagatggaggaagacggcgtccgcaagtgtaagaagtgcgaagggccttgccgcaaagtgtgtaacggaataggtattggtgaatttaaagactcactctccataaatgctacgaatattaaacacttcaaaaactgcacctccatcagtggcgatctccacatcctgccggtggcatttaggggtgactccttcacacatactcctcctctggatccacaggaactggatattctgaaaaccgtaaaggaaatcacaggtttgagctgaattatcacatgaatataaatgggaaatcagtgttttagagagagaacttttcgacatatttcctgttcccttggaataaaaacatttcttctgaaattttaccgttaaaaaaaaaaaaaaaaaaaaaaaaa

SEQ ID NO: 608 - DNA, 608 bp, Homo sapiens
tgaatttgataatcctccttttattcaatattaaactttaaaatttgtaccacattattaaagtattacttttactcacagtagtattatacatagacttaacacaatttttaaaaatgtgtttacttaaaacaatataattctcctttacaaaagcaactttatataaaatgtttggcttaagactgtcattgctattatgcctttgaatgaaattccactctttcgcctccattgtccagaaacaggcacatatcagcttgttttctttaatgaatattctgtaacaagttcctgaagttttctaattctttcacacttgtagaaattcttccaaatgcgttgaataatgatactatttcttgtctggttagatggaattcataactaggtccactttctggcatatttgctatcaatttctcagaaaataagatcttcagagcagtgcccaaaccctgagtctgaagctttccccacagacgacatttaaaacaaccaacacaatccataattcttgaaatatttctaaaatgcagtcgaaagtccttcttttagttgtgtgcttcttttttatccccagcaaaaaatgaattcttatcaaaatg

SEQ ID NO: 609 - DNA, 505 bp, Homo sapiens
tttttttttttttaaggcagtcagaatacacgtttattgattaagtacaccatcttgtataggcagagttattggcaccctatagtacaacactaacatcaaatatcactgatcacagatcaccataacagttatttattaatgaaaaagtttgaaatattatgtgaattaccaaatgagacatagagataaaaaatgagcacatgctgttggaaaaaaatggcactgatagacttccttgatacagggttgtcacaaaccttcaatttgtaaaaaactcaatacctacaaagagcaataaagcgaagtacaataaagtgtgcctgtaatatgaatgtacaaaatatagtagtttttgagatcttttttggttattttattattcattttaacttattataaaatattttgaacataagaagtagagaaaatagtataccaaatcctcatttattcatcacccacatccagtccttatttttaaaattttgttaatagacatata

SEQ ID NO: 610 - DNA, 2127 bp, Homo sapiens
aagtcatgtttatatattgctgcaaatactcggaatggggatctcttgttccctgcttaagaccacatcacattacttggttttgtacgctagtggctgaaccaaaaaaagtaggagatgattttttttcttttttcttaaagcagtagcttttgaaccttgaccatgctttctaaccagctgaggggcttttgaaaaagagggtgccttactgtgccccagaccaggacaatcagtatttctggggaatggagcctggcacacacacatttcttaaagctcccttggcaattctgaggagtggattacatgttgtatgtagctcgtaacgaaagaaatcttgtctttgctctcagacccccatttcttactcatctcatgagctccttcgagatccagaaacagttgcatatttcattagtaaatcagttccagagtcacattttatttcacaagttagtccattaaaagtttcctgcagtgaggaaatagccagaaagaacactccacccctcctcctttttataactatagggtctggctcgacagagcaggagcatcgccatcttggacaagcccctcattctaaagttcaccttaataaaaaactgcctaaattcaaactgcatcagcctaatggctaaggtcagcatgaccataaaccacaaataacatctccaaccggaaacattcgaaactcctcctcgaccagagacatgctagtcccgagataacccccctccagcagggaggatgccagtctcgggataacctctctctggccagaaagatgcctgccccaagataaacttgcctcctcccagagatattccaaccctgccataaaacttctccctcaaacaggaacattccaaaattctgataatctccctcaccctaaaaccaatatatactcctagtctgtaagagaaagcgctcttgaccaaaattcaccaggagtgcctcccaggttttaactaaagaaaacctctctttaactgccaaaaaaaaaaagggaaaaaaaaaagctttctgcagtggctttcagcgggcccagcatggcagcagcacctgagaacctgttggagatgcacactcttggaccccaccctggcctctgagtaagacactggaagggcaggccccggtctgtgcacacaagtcctcagggagattctgactgatgcatgccagattttgagaactgctgatatactccaggcacatcgcatgctgggatctagatacaccaagggaacaaaataactgcacttgtcctctggggaccgacttaccttttggaagggctgagaaagagagacacatacaagatcactccctgtaatgcaatgttttataacagatgtgatttgggatttcagtgggagcccaaaagagggactgactaattcagcctctgtgacaaggggagtttctcagaaacagaatgcttagctgggcctccaggcacagggacaggaatgaggaaatacttgtaggccctgtgctccttcagcaaaaccctcagtttcttgttatttttataaatgcaaacatcttattaaagtagatgctaaggcattagaatttcctgctttatttttctaaatgaccatgaggaaacctggaatgtcaaaggtaaagtgcaacacattctgcatttaaaaattaaaatgatcctttttaaaagtagcaaccagatgtgaaaaattggactggagtccaggttatagttgatagctttaactttctccccaacagcaacagcacaattttccctaaaatgtgttatgaataagtaaaatgactacttcacatcctttaactcttcctacagaaatctaagagagaaatgaaacaaaagtttgcacagttctagacacgataaatacatgtgaaatcacacaactcagaaaatgtcccttaaattaattgagccattggtacttgtgaattagaagagacatctatgttctgatccactgttgaaagctgtacaatgttacctatttatttgcagacatcctttggaaacaaataggtagatttgcaacaaataaagagtggagtacagctgctgacattaccttgtatattcatgcctttatgtaaaaaaaaaaaaaaaaa

SEQ ID NO: 611 - DNA, 724 bp, Homo sapiens
ggtgagccccgagattctggctcagagaggtgtcatgggcttccaaaagttctcccccttcctggctctcagcatcttggtcctgttgcaggcaggcagcctccatgcagcaccattcaggtctgccctggagagcagcccagcagacccggccacgctcagtgaggacgaagcgcgcctcctgctggctgcactggtgcaggactatgtgcagatgaaggccagtgagctggagcaggagcaagagagagagggctccagcctggacagccccagatctaagcggtgcggtaatctgagtacttgcatgctgggcacatacacgcaggacttcaacaagtttcacacgttcccccaaactgcaattggggttggagcacctggaaagaaaagggatatgtccagcgacttggagagagaccatcgccctcatgttagcatgccccagaatgccaactaaactcctccctttccttcctaatttcccttcttgcatccttcctataacttgatgcatgtggtttggttcctctctggtggctctttgggctggtattggtggctttccttgtggcagaggatgtctcaaacttcagatgggaggaaagagagcaggactcacaggttggaagagaatcacctgggaaaataccagaaaatgagggccgctttgagtcccccagagatgtcatcagagctcctctgtcctgctttctgaatgtgc

SEQ ID NO: 612 - DNA, 499 bp, Homo sapiens
tttttttttttttttttcagggatttttttttctcagtttttatttagaaagtttagggaaacaaacatagcatcacagtttagtaatactttaatctcactataatttaacatggtaaaaaatctactaatttttgatttccaacaataaaatttataaaaataattatacatttataaaatgaattatttcacaataaattattcacttctattacctgaaaaaagttgaatactatataaaagtaataacttcccttatcaatattttgaaaatatgctgaaaacatcagttccttttttccagcatctatggcagttcaatatataaaaatataatattataaattccctgaccatagttattgaagcagaatcattactaacaatttcaaagatacagctgtttagtaaatatacatgaataaattacagggttcactaaaaatgaattttatcttttatacttcaaaggcatttgctatgttctgaatttttg

SEQ ID NO: 613 - DNA, 564 bp, Homo sapiens
  misc_feature (1)..(564): n = a, t, g, or c
aacaattgagaaactacttaaagtgaacctaaaatggtgtgagcctgaagtgcttgctgggcagcagacaagctttgccagccttgtgttctcagtggaaatgcagcatccgagccatcctctcttccccccgcttgtggtcagctctaaatagcacactcacagcgcggggggaaaatatttttccctgtttcaagtgggcagtggaagtagtgaaagcctaagtaaactctgaccattagataatgggccattataactctggatgacttcctgaaggaccctgaaaaatgacttctcatttcctgcctgcagaaaagagaaatattaggatagtgttgtgtgcaaaaaaatgcaagcttgcaatgagagatgcagagtgtgagggagagaggcacgaagggggtggagaaaaaagacagagaatttgaggttgactcacggctttgaagggaaaacaggaagangaagaaagtctgtctnccatgggtcggcaacccacactttacacattttttccatggggcttgccncttgccgcccatnacaacttgggcttgccnc

SEQ ID NO: 614 - DNA, 578 bp, Homo sapiens
  misc_feature (1)..(578): n = a, t, g, or c
ttttttttttttttttttttttttccacacctgccctttattggtcttttttagcaaaggggctccaggcccttcacccctttcaaacaccacccatgagggtttaggaaggggccatcattttgtgaaggcccaaagcttacccaagttttggagcccaagttgaatcaccaaccaaagggttgggaaaggaaaaggaaacaggcagaggggaaaggcaaggctctgcagtgaaggggactgatttcaagggaatgctgaggtccaccagtgtctcctgaaggcatgctgcatcctaaggctcctcaggactggatggagtaggagatctgtgtgttgagcagttcacatttatatggcaactttaaggaggcgcttgatgtcaggctcaatgttgatggttggggaaggtgncggctgtagccgtcggaagggctctccctccggccctatgaggaacttctcaaagttccaggccacatctgagcggcgcacagggctccaatgatgagcttggnatcggtcatgagggaaaatggtcatcatagggtagggggaacttgtctttaggtagcgaa

SEQ ID NO: 615 - DNA, 472 bp, Homo sapiens
agataaagttcatacagaatatgttacagtcaggagttctcagctttcaccaaaaggtcagaagttattgcagttgtgcccagtggataggatggaggaagggaaacttctagaaagctgcctgtgttcagagaaggaatcgtcaatgtttaaagttgtggggctgccctgcaaaggatgttccagggcaggtaggagtcaggagtaggagacaaggcgcgtagggggcgatagggtggcctgggcttgggcaggctggaggctgcctccctaccggaagcagcgtccgggccatctggccaggacctgccaaggggacagcagagccagggccacagggtgccctggggccagccctgccagccggtgtctcagccccgccgtagtgcctgcagctggggggccactttctgcagctctgcctcaatggccgacaggctctccagctactgggtctctgtcctgcggattg

SEQ ID NO: 616 - DNA, 823 bp, Homo sapiens
ggctagtacgaggccgggtggttaatgggcgaggggatgttttgctttagctagggcagtgacataagaattccatgttagataagcatatgttacttaccttgtaattaaatatttcttgataagcaattttaatggtttaatttctatgtggacgtatgttaaattttccaacctaccctatgttaagcattcggttttaaaatttttatgctgaatataaatgctcaagtaagtttacacaagtattgaacagcatccctgctcggtatcaatttctgtagtaaatgcattggatcagttggactttgaacgcctttggacaatggctttgctaaaatgctcccgccacgaacagttgtaggaccatgggacacgcaggagtcacactagcaggcaagggagttgcagagagctgcaactgtaaagggcgaagaacaggcagaggtaacaaagatgatggaaggtgtggtgactaagggccacggttattgggtgaaatttgagattgtaggccaagctgtattttcaacgcttctgaacttaggcaaaatattcatcgcaaagtctctagcgtcatatttttctcacccaaattacgtttccacgagattatttatatatgagttggtctatctctgcagtccttgaaggtgaagttgtcgtgtaactaggctgtgtttagggatgtcacgcagatggcctgaagtgagttgtgcaataaatgttaagttgaaacctcaggaaaaatgactaaaaaactcccagggaattatggccgagtcgggagaaccccggtattgcacaggggcctgggccctag

SEQ ID NO: 617 - DNA, 3493 bp, Homo sapiens
ctgagagggagacgctccaagaggctcctcagtgtgggcgagtaaaatgccctgcgtgtgagaagcaggctcagattattgctactctgtattcagatcttcatgtgtctcttctaagctgaataaagctgttttggaactgtcaggtacctcaaagctctgactgacagtactccacaagcttgcctgccatgggctgtcgggatgtccacgcagccacagtcctttccttcctgtgtggaatcgcctcagtagcaggcctctttgcagggactctgcttcccaactggagaaaattacgattgatcacattcaacagaaacgagaagaacctgactgtttacacaggcctgtgggtgaaatgtgcccggtatgacgggagcagtgactgcctgatgtacgacactacttggtactcatcagttgaccagctggacctgcgtgtcctccagtttgccctacccctcagcatgctgatcgccatgggtgccctgctgctctgcctgattggaatgtgcaacactgccttcaggtcctcggtgcccaacatcaaactggccaagtgtctggtcaatagtgcaggttgccacctggtggctgggctgctatttttcctggcaggtactgtgagcctctccccatctatctgggtcatcttttataacatccatctgaacaagaagtttgagccagtcttttcatttgactatgcagtgtatgtcactattgctagtgctgggggcctgtttatgacttcccttatactatttatttggtattgtacatgcaaatctttgccttctcctttctggcaaccattgtactcccatccacccagtatgcatacttactcacagccctattcagcacgctctcgcctctctgccattgaaattgacattccagtagtttcacacaccacttaatggggaaatagttaattgttaaagaaaacttcttgtagcctcacattccccttgtgcaaagagctcttttggacctacatacattttcctttgtttttgaccaatcaatgaagccaaatttatatgtcctattagaatgaagtgctgctagtttttatgagaagtatattatattaaatgtgaattttttaaattttgcttcttatactggaaggaattttagccttcatattgatatctaattaattatttaagtggaagaggcctgcatcacaattgaggtaatgtagagcaacatgttaaagaatgatggttagcagaagctgttgtatacaatcttcatgaaaatttcagtgtgtatttttctttttctataatacctttaactgcaaagaaaaggcagtttcaaatataagaaatttatttcaggtaagggtaatattttaatagtagtcagtaatctagcttaaggctgtaactcttctatcggggctaattgtatgaataggtgtcagtatgttgaagattactttcttttgtgactttcttctacctcatgccactgtttaaaagtaaaatgtattttaatgatgttagaataagactaccattctaaatatcacctacttatgaataacatgtaataatttttaacattaatgattccataaattgtattattgggattagaatgtgctttatgacaggttagtgtttcctctgaggcagaaaactcttttttggagatatcttccatcaagcagtactcgtgcccatatacaatctcttagtggctaggagaaataaataaaagggccataatggtttgttctctttcagacataatttagtaggggacaagaagtctgttcttcagtgagtacactagagatttactctggtgactgccttttgagttatgggtgaagtaaggtatggctttaccataaccttgattcattcacccttgattcatttctcgcccccgtcactgattatttccttgagcatatatctctgcctaacactttagtaggtgctatagaggatacatgaaaagtatgagatctggttccatccagtaagacattttaatagagaagatcaaaatgttacctggcagttggggaataatctgacttcgttggcagttggccttaacttcttaatcattgatccaggaatatttcaaccagagacacaactttctggcagacagacaaattgtacaacaccaacaatatcctggaccttgaaattctgtttacttcagtccattgtatcctttaaggcacctgtgctagcctagattttgtaataacactgatttatgagaatggacaaaagtggtagggaaattgttccctctccacttctgaaagtatgatgatgtattaaggatggaggagttattaaaaatgtctcttctgatgaggtaacaattagatgaaaccatgttaaagctgagatgaacacttagaaattcagggatattgggtctttagccttatgaatttgagctgcttatttaattggtgtaatttactacatattagtactatattcgtaaggattttttattaaccattacagattttacaaacagctagttatatggtaaacagattattatgcctttttgcaattctgaatatgattctagtatttgtgtagatgtatttggtactttttcccctaattccaacactagtttatatatatagcgaataaatctagttgtataaatttttaaatgccgtcagtagaaagcacacaaggttatgatttttttaattactggcttctgatttctttcacttctgatccttttcctttttctcagatgtagctgagtcttgatcattttaagacaacgatgggtagaattttgagattaatgttaattttccctttttgttaatttcagtcccctctcactatgcttttgtccagaaggatcaagaattctaccatcccttgggtctttgtgtataaacaatgttaaataaaggtagactcagtctttaagatattagacagtttttttagtccatgggattgtaaatataaacattaactttcctataagaatattttggctttgtaatctatagcctcaaattggtatttattatggattcactagacaaacagctgtttccttattgtcttttttctttagtgtttctgatttgctatcagtagctgtttttaaagccgtccaaggaaaataattatttacagtttttgaagtcacttttgagccctcatcaagctctcattgtgatgggagggatacctttttgttgttaaaagcctattattgttaaaggccttttatggaaaccaacttggaaaacaaccttaaatgtggatgtatcagatttggtttatccagccatgggagagaaaacaaacctaagtttactttacttgtacatatacactacaatggatagtatatttgctgtaaactacaatgtaaaacctcaataaaagtgcgctgtacttcttaatgtttattaaaagatgtatttttacaaaaaaaaaaaaaaaaaaaaaaaaaa

SEQ ID NO: 618 - DNA, 2016 bp, Homo sapiens
gggttcgtagcttccaacggctgcgcgcgcacttcggtcgcgggcggtgaggtgctgttgctgaaacgctgccgctgagggtggactcgatttcccagggtcccgccgcgggagtctccggcgggcgggcgcgcgcgagccaccgagcgaggtgatagaggcggcggcccaggcgtctgggtcctgctggtcttcgcctttcttctccgcttctaccccgtcggccgctgccactggggtccctggccccaccgacatggcggcggtgttgcagcaagtcctggagcgcacggagctgaacaagctgcccaagtctgtccagaacaaacttgaaaagttccttgctgatcagcaatccgagatcgatggcctgaaggggcggcatgagaaatttaaggtggagagcgaacaacagtattttgaaatagaaaagaggttgtcccacagtcaggagagacttgtgaatgaaacccgagagtgtcaaagcttgcggcttgagctagagaaactcaacaatcaactgaaggcactaactgagaaaaacaaagaacttgaaattgctcaggatcgcaatattgccattcagagccaatttacaagaacaaaggaagaattagaagctgagaaaagagacttaattagaaccaatgagagactatctcaagaacttgaatacttaacagatcagtttcctaattcatctcagaacggttcatgccgacaagtgcagtatcctctgacagacatgtcccccatcctaactagtggggactctgatatatccagtccattactgcaaaatactgtccacattgacctcagtgctctaaatccagagctggtccaggcagtgcagcatgtagtgattgggcccagtagcctgattgtgcatttcaatgaagtcataggaagagggcattttggttgtgtatatcatgggactttgttggacaatgatggcaagaaaattcactgtgctgtgaaatccttgaacagaatcactgacataggagaagtttcccaatttctgaccgagggaatcatcatgaaagattttagtcatcccaatgtcctctcgctcctgggaatctgcctgcgaagtgaagggtctccgctggtggtcctaccatacatgaaacatggagatcttcgaaatttcattcgaaatgagactcataatccaactgtaaaagatcttattggctttggtcttcaagtagccaaaggcatgaaatatcttgcaagcaaaaagtttgtccacagagacttggctgcaagaaactgtatgctggatgaaaaattcacagtcaaggttgctgattttggtcttgccagagacatgtatgataaagaatactatagtgtacacaacaaaacaggtgcaaagctgccagtgaagtggatggctttggaaagtctgcaaactcaaaagtttaccaccaagtcagatgtgtggtcctttggcgtgctcctctgggagctgatgacaagaggagccccaccttatcctgacgtaaacacctttgatataactgtttacttgttgcaagggagaagactcctacaacccgaatactgcccagaccccttatatgaagtaatgctaaaatgctggcaccctaaagccgaaatgcgcccatccttttctgaactggtgtcccggatatcagcgatcttctctactttcattggggagcactatgtccatgtgaacgctacttatgtgaacgtaaaatgtgtcgctccgtatccttctctgttgccatcagaagataacgctgatgatgaggtggacacacgaccagcctccttctgggagacatcatagtgctagcactatgtcaaagcaacagtccacactttgtccaatggttttttcactgcctgacctttaaaaggccatcgatattctttgctcttgccaaaattgcactattataggacttgtattgttatttaaattactggattctaaggaatttcttatctgacagagcatcagaaccagaggcttgg

SEQ ID NO: 619 - DNA, 537 bp, Homo sapiens
ttttttttttttgatagcaaataagttttaatcagcagagaccttaaacgtcaatcatggcaagaggaggggacacaaacacccagcgcgggcttgctaaattcaagatttaaatatattgcctttctttcactacaatcacaactcacttaggtagatactttaattcacattttacagatgagaagattcagagtttaagcttcccaaggacagaaaggtaagtcagtgggaaattccatgtacattccattactaaatgccacataactgtttggataacataagaagagtgggtcattatatgataccaattacaagatattagggatggtggaggcagtaatttctgggataagaactataatttacagaataaccagacatcatctgatctggtgaaacctgtgcattcccacaattaggctttttcacactttctctctttaaatgtgcaacaccttccccatcccctttacttgtagcagttgattctgcttcttatatcccgagaaagcaactaccaccaaatctacc

SEQ ID NO: 620 - DNA, 490 bp, Homo sapiens
gaatttatttttacacattaacagtctcctctttttattgaaaacagtttgcattatttgtagtgaaacaaaaatcatgccttgatgaatgtaattttaatatatccatctcttattaaacaaattatacatttaattcttggcacctatatttaatatcttttatactaacaaagattacatacacgcattgaaggaagactacacactcatgtctaagcctctctcatcagttaagaaatataccctatattgaaaaatgcatgtatttgaagttgtgacctaacacagtggattaaagcttagacaatatttactttgccgcactttgattcagaaagggccatatgtgaagatatgatcctaaccaactttaacatgtttctataatgatctctcagtaaaaagatttatattaaagatattgagatataaaatagttacaaaataagctgtagccttatagctacccattggtaaaagtctatag

SEQ ID NO: 621 - DNA, 538 bp, Homo sapiens
aaaggttttcaaaaatggatttattatgaggtacaagtggcaatgaagtagtaatgaaataaatattcaaaattaggttatgacatgagatgtgtcggtttcgatgttcctggggctgcagttaccaaactgccagcttataatggttgggtaggaaggaaatttatcatctaactaaacaagaagtgcggaggcggctgactgcatcgcaggtcaagcttcaccctcaggctggcaatcagagctccccagctgcaagcttctttttcagacaaggcgatgtccagaagcaaaaggagcatctcttgctctgcttctttcttaggcttgaggaaattttttccagaagctaccagcagtctcccttttcagtgttaatcatcaggactgggacccacttccattcctgtgctgccaagaggaacagggtgtccacagccgccttccagtcattatgtatggtgaatagatactgccagtccacagcaatggccacaacatgatttggaaaacacattaattcccttaaaacatacct

SEQ ID NO: 622 - DNA, 684 bp, Homo sapiens
tttttttcaatttttcctctttgaaagataaatttctgctcaaagggacaatattcttgctggatgcgtttctgtaaatgcttcacagtttgaagacaaaggaatgcaacttcccaaaatgtgcccgaggtggaagtacttcctggctagtcggtgtaaacgttgcaaaaccagtctgtgggtctaagagctaatgcgggcatggctgttgggatggaggacctgctgtggcttggtcctgggtatcgaaagagtctggatttttagggctcatactatcctccgtggtcatgctccaataaattcactgctttgtggcgcgacccttaggtattctgcattttcagctgtggagcccttaaagatgccatttggcttggcttccttgggaaagaagtcctgctggtagtcagggttgtccaggctaatttggtggctgcctttctgggcccagtgggcagggctgtcgaatgtgctgttgacacaggtgggctggacagtgttgagatactcagggttgcccactgcagtgctgtgggggtcctggtagtgtgggtctctgctgagcgcggtgttcagaggctgattgtgatagacaggattctgcacagagccagcgggcactttgggaacggactgggatatgtattcagggcctgggaagaaggtgtcgtctatgctttc

SEQ ID NO: 623 - DNA, 501 bp, Homo sapiens
ttttagtgacactgaattctttatttaaaaaaatttttgtaacacacagtacctcctcttctcttctatttttaggaagaagttataacaagttttaaatatctcaattctgaaaaacaataggcttttaaaaaataagacttgattaccagaaacaagtaacatgtagttacataaccattttcatatcactactcatttccattatttaccaattcatctttgatgcaacttggaaacaattaagcagtcactagacacctgttttagaatctgaagaaattattatccaccacaggaatctaatgatatatatatttgcatatatttaaaatttcatgagggaaaaggtaataaactattctagttattttataccaaatattgatattcctagtcaaaacaacaaggaattaagatctttctccaggtgaactgctgactatatagaagctatttccagcactttcttctggggattaaaaatgatttatttccctg

SEQ ID NO: 624 - DNA, 503 bp, Homo sapiens
  misc_feature (1)..(503): n = a, t, g, or c
tatgtataaatataaagtttatttagcatagtgtttagaaaaataagttcacatcatttcagaaaacaaataaaacacttaattgtccaggcataaacccccattacagtacgacatacatacttcagatctctttggttgggtaattaagcacagaaatgttctgggacatgctctgtgtgccatcacctaacagtgcagtaaagactctgttaccccaccccatgacatacattctgtatagagtttctctttgtgtaaggcacagtaaaaccatattgagtatataattggttgcctctaaacatacagtacatgcaacaaaataatatttttgagaactctgaaagccaaaagagtcacatgctatacaattttgattaataaaatgtatggtggtaaattaacataaaatgtatcaattagatacaaagtaactgctaggctctattatctaagttntacaaagagtttaaaatatcttttgtgaatgtaactatttc

SEQ ID NO: 625 - DNA, 561 bp, Homo sapiens
tttttgttattttattattttattgaatgatgacacccaaactgagctagaacataattctggctctgctagtacatcttctgtgtgatcttggacaagtcactctactttcctttcaattttcttttctcacagggagataatcataaaaacgactgtaaagtacagcacttcatagagtgctttttgtttaaagagctgacaataaatacgagtctcaaggtctaggaaagcctccctcacaaccctgacctgcttgaggacaagggatttcttttgaatcagcagtaccttatttgtgtatctgtgatagagttcctggtacataaggtctcaataaatatgtgaatttatgaatattaggcagattgcaaccttgacaggccactgcctcttaaatctcctttctgtgatcttttaatatttaacatctaaaaggccgccgctacttgctttgggataagtatccccggtatgtactttaaaatgcccaagcctagagaaatggttcttgtcttaagggcaccatttcgctctcccaccgtaaagcgccccaggctt

SEQ ID NO: 626 - DNA, 1404 bp, Homo sapiens
aattcgacacgaggggggagcgtgcgtaggggatggtgccagcgctgcgttatttggttggtgcctgcggacgggcccgcgggcgtttcgccggtggctcccctggggcgtgcgggttcgcgtctgggaggccaagaccgctgtgtggaggtagccgcagcgccagcaccagctcatttgatatagtcattgttggtggcggaattgtggggcttgcctctgccagagcactcatcctgcgacatccatcactttctattggtgttctggaaaaggagaaagatttagctgttcaccagactggacataacagtggtgtcatacatagtggaatttattataaacctgagtctctgaaagccaaattatgtgtacaaggtgcagccctcctctatgagtactgtcagcaaaagggaatttcctacaagcagtgtggcaagcttatagtagctgttgaacaagaagaaattcccagacttcaggccctatatgagaaaggcctccagaatggtgtcccgggcctgaggctgatccagcaggaggatataaaaaagaaggagccatattgtaggggtctaatggctattgattgtccacatactggcattgtggactatcggcaggtggctttgtcatttgcccaggatttccaagaagcaggtggctctgtcttgaccaattttgaagtaaaaggtattgaaatggctaaagaaagtccttcaagaagtatagatggaatgcaatatccaattgttataaagaatacaaagggagaggaaattcgatgtcagtatgttgtgacatgtgcaggactttactcagaccgtatttcagagttgagtggctgcactcctgatcctcgaattgtaccattccggggagattacctgcttttgaagccagaaaaatgttatcttgtaaaaggaaatatttatccggtcccagatagccggtttcctttcctaggagttcacttcacaccaaggatggatggcagtatttggctagggcctaatgcagttcttgcctttaaacgagagggttacagaccctttgacttcagtgccacagatgttatggatataattatcaatagtggcttgattaaactggcatcccagaatttttcctatggagttactgaaatgtataaagcatgttttcttggtgcaacagtgaagtatcttcaaaaattcatccctgaaattactatcagtgatatacttaggcaggtggctgtgagaggaccgagctggctatggcagcaacccatgaaagtgagtgataacaacatttattgtttcctgtggcgttgctttgctttgctattgactggtagcacttgtagctttaaataaattgaggaagtatgagagagtaaatggaaaaaaaaaaaaaaaaaaa

SEQ ID NO: 627 - DNA, 362 bp, Homo sapiens
cggccgccgagttccgcggctccgggagcgaagcgcgcacctgggaggcagacggcacctcctgcgaccgtcgccgccaccgccgccgccgccgccgggcgccgaggggctggcgggcgagccggcgggcgggtcggcgggccagcgggcggggcagcgcgggaagcgctaggcgctcatgcactcggtaaccttcaggcgccccggccgcccgcctgcaacctgcggagcccgcgtcgcagcagcccggacaggaagattggtctggatgtgggtccggtcttacagtcgcgggccaggatgagggcaggttgcgacagcgccgcaccggataccttcagcggcgtttagccctcgtgccg

SEQ ID NO: 628 - DNA, 547 bp, Homo sapiens
aaatcaaatattggttttatttttcaagtgtcaaagtctttgccatagaaaatagaaaggaccttttataagctaaacattacatttgtgctacatcatttaataactccacactcttttatggtttgtgctttacaaatttccaaactacttcttcacaatgtacaggtgcacaataaaaatgtatgcatacattcacatacacacatttttacataggaatgtttctcattaaatacacatttagtgaacttaacacagacactactgtggcctaaaggcatccccaagccccagggtcagaagtgccctagaaagaaataggtatagatgtggaaacattatctaacattcaaattagcactctaattatcagaaatgatgacataatgaggaatactcactttaatatttctaaaaaagatgtcattaatctatactaaatcatttgacagccttattcatcgaaaaaataaacttcaaattttcctcaatacataagttaatctcaacatagacatcactgccatacgtacacacccttaac

SEQ ID NO: 629 - DNA, 598 bp, Homo sapiens
  misc_feature (1)..(598): n = a, t, g, or c
tcctcaccgtattccacatacctgtggctggggaaggtaatgttacctctgcaaacagatgctctggtaagagaagaaagacacagggaaggcagagagagcaagacagagggctcaatcacaaagctgggacaaggagagcagctgtttttcacacattcctgctcctctctcagctgggctcatgttcactccgtttcattccaatcatcagggtggagatttcagaggtgactatccctaatccagtagagaacatgagccctgggagcacagctgcctggaagtcctcccaagggtctcctccccttttccagactcagcatcattgaagccctaacgggtccttgtaaattaatgtttcatattatcgaaggactgtcagtttagtttggtacagtttattgtagcctaagaggtccagcaagatttcaagagaggagagatgattgcattactttgattacaatgaatacaatctttaggatactctttactttttgtacaataacgatatgaaaggaantttttattctacctatacacagctcaaaataaaggtataacttctggaactgagaactgatgggatggagag

SEQ ID NO: 630 - DNA, 533 bp, Homo sapiens
tttaagttaattctttaaatttaatcagtcatttataaaactccccaattagtaaaagttggcttattttaacagccttaaacattggccactatttaaacaagacattctaaaaaaaaagcaatcacataatagtttatagtcatttacaagtggatggtatacatttagatacagaggtagaagttcacctttacaatgtttcactaatacacatataccaaattcaaggcacaaaatagtttgctttacaaaaaaatactgtaaaaatgtcatttgctgttctacaatgtgaataaacctttcaaaagaatctttacacccttccatacatatgccatagaataagatttcttcctctcactaatcatagttggcacaaaaatggggacttttcaatgtagaagttcccatttttaaaaactgtttctttgcagagctgctatgtattctagataagagtccatccaaagaaatgaaacacagcaacttcctgaggaaagggcactttctgtatgcagcaaaattcatag

SEQ ID NO: 631 - DNA, 552 bp, Homo sapiens
ttttttagattttattcacttttatttcaaatttaaagtgtgcttcacacaacttgaatcaagttgatattttaattgtggtagctggcccaccccaaaggtttcagataaataatatatacatataatcatagatgtaggtgctaattaaatccattactttaatttcattaaattatcatgaagcaggaatgggacaaagaggagaaggtatcatcaacgtactgatgaatcaaagtagcaaaagcgtaaaagtcattggatattagaaaaaaatgaattatgataattttcccaaaaagggtttttaagacaagactctaatgtaatcttctgtatagagagcatagcccatgacaccccagttaagtactgctcttggagtactgctgggcttgctgtgagcagaaacacctggattattttttcccatatcacctaatcagcctggtcattggacatacttcagtatcggggttccaggggttcttgactggatgtaatcccaccccctacttgagggccgctccatggtcacgtccacgagaaccc

SEQ ID NO: 632 - DNA, 2680 bp, Homo sapiens
cggaccgtgcaatggcccagcgtaagaatgccaagagcagcggcaacagcagcagcagcggctccggcagcggtagcacgagtgcgggcagcagcagccccggggcccggagagagacaaagcatggaggacacaagaatgggaggaaaggcggactctcaggaacttcattcttcacgtggtttatggtgattgcattgctgggcgtctggacatctgtagctgtcgtttggtttgatcttgttgactatgaggaagttctaggaaaactaggaatctatgatgctgatggtgatggagattttgatgtggatgatgccaaagttttattaggacttaaagagagatctacttcagagccagcagtcccgccagaagaggctgagccacacactgagcccgaggagcaggttcctgtggaggcagaaccccagaatatcgaagatgaagcaaaagaacaaattcagtcccttctccatgaaatggtacacgcagaacatgttgagggagaagacttgcaacaagaagatggacccacaggagaaccacaacaagaggatgatgagtttcttatggcgactgatgtagatgatagatttgagaccctggaacctgaagtatctcatgaagaaaccgagcatagttaccacgtggaagagacagtttcacaagactgtaatcaggatatggaagagatgatgtctgagcaggaaaatccagattccagtgaaccagtagtagaagatgaaagattgcaccatgatacagatgatgtaacataccaagtctatgaggaacaagcagtatatgaacctctagaaaatgaagggatagaaatcacagaagtaactgctccccctgaggataatcctgtagaagattcacaggtaattgtagaagaagtaagcatttttcctgtggaagaacagcaggaagtaccaccagatacttaaagcttcaaaaagactgcccctaccaccacaggaggaccagcctaaccatacgctccaaaagatggctgtgatagatcttgtgaagcaattactgagcagatcaagatctttgggaaggaacactaaagatgttttgaatgaattatagtccactggcattttagtgtatttttttttctttttacaaacacacatttctaaaaatgtcatgttacattcctgcatgtcccttttgatagcattagtggatccattggatttcttttttctttttgtgagacagcttttagtcttacctgaatttatgtgtgtttttccgacagtggttaataattatattggtgatgtagcagcaattgtgttggcagggttttcatatattattagtaattaacactaactgttggactgacttgtgtacactgtgttaaacatgatttaaaagctattaagagtactttgtgttagcactcttaaaaacgctaacagagatcatcattagctgtgaagatttgagttgtatatacctgcactgatattcttatcaaaaatttctacattagctttaagtgttcagattaacacttttgaaatttttgtagcttttagctgattaattagaaaaattaatatttcagtgaaagttttaaattatcatttatttatttttttaaatgagaggggaaagctgaaattccttgttaagacacaaggaaaaagaatggccctactattatcatgcaaaaatgctttgttggcacctcagattaatcatataatagctatagtctcttcagcatttgtttaaattttagaaaacctgtataaattactggtgcataacttaaagattattctgcctttggctaattgagtaattcccctccagcactagagaccgctcagtgctcttactagatgaactcagtaacgccttgagctgggttgattgaggatgtgtgaaaagctcacagagcccgatgcctgctgctatttcacggcaatgagcctttttctttctacactgaagattttcttcttatttaatgtggtttattttgggctcagaaataattgctctgttgaaaataatcctttgtcagaaaagaaggtagctaccacatcattttgaaaggaccatgagcaactataagcaaagccataagaagtggtttgatcgatatattaggggtagctcttgattttgttaacattaagataaggtgactttttccccctgcttttaggattaaaatcaaagatacttctatatttttatcactatagatcatagttattatacaatgtagtgagtcctgcatgggtactcgatgtgtaatgaaacctgaaataataagataataagaaaagcaataattttctaaagctgtgctgtcggtgatacagagacgatactcaaattataataaaactcttcattttgtgaattatagaagctactttttataaagccatatttttttagggaaactaaggagtgacatagaactgatgaatgagcaaaagtaagttttgctggatttttgtagaactctggacgttgaggattcattatgctgtggttaactttaaatatttttgaattccaaatatctgaattaatgagccttgtgtttacaaatatgtgccattgtgcaacatcggtggattttctaaaaataatgtaaatgtcttctattaaatgttgagtgcaataaaatccagaa

SEQ ID NO: 633 - DNA, 1822 bp, Homo sapiens
acttgttgattcccaggagggccgcctttccggtctgggtccccgagaggactgccttgctcacctgtcccctcggcgcggccccggggagctcccgagaggcccccgggatcgctggccctccgaactccacagcaatgagcaagttgggcaagttctttaaagggggcggctcttctaagagccgagccgctcccagtccccaggaggccctggtccgacttcgggagactgaggagatgctgggcaagaaacaagagtacctggaaaatcgaatccagagagaaatcgccctggccaagaagcacggcacgcagaataagcgagctgcattacaggcactaaagagaaagaagaggttcgagaaacagctcactcagattgatggcacactttctaccattgagttccagagggaagcctggagaactcacacaccaacactgaggtgttaaggaacatgggctttgcagcaaaagcgatgaaatctgttcatgaaaacatggatctgaacaaaatagatgatttgatgcaagagatcacagagcaacaggatatcgcccaagaaatctcagaagcattttctcaacgggttggctttggtgatgactttgatgaggatgagttgatggcagaacttgaagaattggaacaggaggaattaaataagaagatgacaaatatccgccttccaaatgtgccttcctcttctctcccagcacagccaaatagaaaaccaggcatgtcgtccactgcacgtcgatcccgagcagcatcttcccagagggcagaagaagaggatgatgatatcaaacaattggcagcttgggctacctaaactaaaacacatttttgatacctaaattaatgagctatagataaaatataaaaaatgtttttaccaagttcagaagttaacaaagactctgctttataattatattgaatgaataattgtgttttaagcctcctaagtaaaagtaaaaaaggagtcatgtgcatacatagaatcagtgatggaggccaggcacggtatctcatgcctatagtcccagcactttgggaggctgaggcagttgagaccaggagttcgagtccagcctgaccaacatgaagaaaccctgtctgtactaaaaatacaaaaattagccggacatggtggcaggcacctgtaatcccagctacttgggaggctgagtcaggagaattgcttgagcccaggagatggaggttgcagtgagccaagatcatgccactgcactccagactgggcaacagagggagactccgtctcaaaaactaaaaaaaaaaaatacatttagtatagcggggggtgggggggagaaataatgttatttcctatgcgaatgacgtgtatccctgtacccatggtaaatgtaaatatactgtgtctcttttgggagagccttttagtagaggagtcttatatgagtctctacataagtagtttcacttgagttttgcagtttgaaatcttaaaggagctttaattgacatttattataccaattaagcttggaatggggcaatggatgcatttcccaaaacgtgtgaaagcactaacagcttatattgctgaatgagaatctcctgggtgtaatttagccacttagggaactgcgtgaacactcccaggccattatgatgctgttacagcttcagtgtataaatgcatgagtattctttctgttctgttttgtgctctcttgtacatttatttaccctttacagaatatttcttgtaaatacataaaaatattggcaattaaaagtacatcttgaataaaaaaaaaaaaaaaaa

SEQ ID NO: 634 - DNA, 2582 bp, Homo sapiens
aggagaagctgatgaagagctagttgatgatggagaagatcagaatgatccctctcgatgggatgaatcaggagaagtttgtatgtctctagatgattaactgacctactatactcctcaaggatgctgcatttggacctaatatgaatcgacaatttggattgttgaacttgaaggcttgcaaaatatggtacatgctggatagtagttatgttgctgtgaaaactgtagggtcaaagccttatagcaaaaaaaatttttttttatatttgcacaggactatacagcaaacaaccatgtggttggattacatggagtccccacatactcagtcagttatcaaagtaaaatattttttatttataggatatacagtaactatttgggtcctatgaaaatagtccttaaagagcttacattcatgtgctactttaacatgaatggagaaaatccgtttatggaagtacagtgacaattgacccaatcactctgtccatcaaaccactcaggctagtttgtactagtagagttttgtttctatttttatttttattaattttattttttttaatacagattttcagtgaggggctttttcaatcccattggttctattttcttgtatttttccatttaatttgcttcataacttaaaccaagtctcttctagtcttaggtattatttctcgattttgtgctgatgggcatgtttataagaactggactttttgacatgaattttactacttcacaaatgaagaatgatgttatgaagttaccgtggcgaagttgacaaataccactaaaatgattatgatttagaagtaactttcttctgctgctctaatctgataaatggttactatatgatattttctgacatggtatttggttttgggtatctgttactttggcactattcttgtttgcctctttatttttgccagtgtactatacctcagtcctatttgaaagacctaattgaaagaaaaatcatagaaataagtaaaatgatttgttttataatttatccaccatgtccagtttggttagcttgttatgcaatataagtgaaatatcaggtttttacccgtgtcccttttatcatgaaaattaacacaaaatgtgcattctcttttgtttcatacttagcgggatattgattgttttgaaattatgatcaatacttaattcatttttttctgtccttgaagtcactacaccttgatacagtctttctagtagtcaccatgattcaacagtctcaaaaatcttacaaataaaattctgagaagctttattattctataaattcttcagggtacaaagggtgacatattgaggtgaaattgtcagatttacttagcctggtgacatgaattagctgattgtggaactctcagcagcatttcacgtattgttaacatgtatggcatttattagcatattgtatattatataagattgagggatgtcatattttcagctttcttttaaataaaaattgagtatattttcctattttatatcaggtaactaaattatgctagttatgtggaaaaaattgcaaagatgctttgacagatataatccctttggtgctccatctgatcaaagttgaaaagttgatgttttttaagagacaagctttatcattgtctctgatttcagtagaataatggtttattgttagacaatgatgtttctgcttggataaatcaaagataaattacagttacatggttagatgcatcttttgtcatctatattgtagtttctacataactgtaaacctgacagataagaatagtttcggtttgatttttgtttaaaacagatgagtacttcttaatgttctagacaaatgagtaaaatgtatttctggtagaaattagttgggcaaagatactatgaatgaaaaagtattttaaacgtaaaatgttctttgtgaatatgtaagtatagtataaagatttctttcatcccatttatccccttcctttaaataaactagtttacaattggtagatctgtctatatataaatatatattaaagaacaaagatatatatctaaaaatcacctaaatctgctttattagactacagttcacttattgcatagaaactggacttggctttacattcttaatgtacttttacttttcctcaagatatgaacttactctcttgaagctgaattttcttttactacttaaatcatttatgtatatctggtaaattatgaccaaatttttgttagattgcatacagtaaattgaaatacacacttggtacactacgggattgttgtgcttttgtttggttttagttggaaataaggtttgatgtagatggcttgttactgttaatttaaaatattctataattgtccattactttatgttgtgttgtgacagatttggctatatttttagtcaattgaaatatgatactttaaaagtttgtttttaggtaatccaaaggaaaagtgtttatactcttgaatatattagcctcagcctatataaaaatttctttgaagtaaacattttaccggaaacagaattgacagatttttct

SEQ ID NO: 635 - DNA, 826 bp, Homo sapiens
gtcctttttcatcccttcatctgctgctgggattgtggatataacaggagccctggcagctgtctccagaggatcaaagccacacccaaagagtaaggcagattagagaccagaaagaccttgactacttccctacttccactgctttttcctgcatttaagccatgtaaatctgggtgtgttacatgaagtgaaaattaattctttctgcccttcagttctttatcctgataccatttaacactgtctgaattaactagactgcaataattctttcttttgaaagcttttaaaggataatgtgcaattcacattaaaatggattcttccatgtcaattagttatactcattttcctgccttgatctttcattagatatttgtatctgcttggaatatattatcttctttttaactgtgtaattggtaattactaaaactctgtaatctccaaaatattgtatcaaattacacaccatgttttctatcattctcatagatctgcttattaacatttaaatacaaagtactatttatgattactctgttgaaaaacaaaacccaaacaaaaagcaaaagagaaacaagacacaaatcaacacgacccgaagcgaaaccagacacacccaacaaaggaaacaaacacaaaacggccagaaaaagaacagcaaataacgcagcagggatacaaaaaaaccaagcacagaaagcgagcagaccagaaacacgtggataagcagcaaccgtacccgccgaaagcggccgaagaccgacaacctacccgcgagaacgagcagaaaacgcagaaccgacacgaccacgccaca

SEQ ID NO: 636 - DNA, 1665 bp, Homo sapiens
ggcacgaggagcaggcgctcttggctcggcgcggcccgctgcaatccgtggaggaacgcgccgccgagccaccatcatgcctgggcacttacaggaaggcttcggctgcgtggtcaccaaccgattcgaccagttatttgacgacgaatcggaccccttcgaggtgctgaaggcagcagagaacaagaaaaaagaagccggcgggggcggcgttgggggccctggggccaagagcgcagctcaggccgcggcccagaccaactccaacgcggcaggcaaacagctgcgcaaggagtcccagaaagaccgcaagaacccgctgccccccagcgttggcgtggttgacaagaaagaggagacgcagccgcccgtggcgcttaagaaagaaggaataagacgagttggaagaagacctgatcaacaacttcagggtgaagggaaaataattgatagaagaccagaaaggcgaccacctcgtgaacgaagattcgaaaagccacttgaagaaaagggtgaaggaggcgaattttcagttgatagaccgattattgaccgacctattcgaggtcgtggtggtcttggaagaggtcgagggggccgtggacgtggaatgggccgaggagatggatttgattctcgtggcaaacgtgaatttgataggcatagtggaagtgatagatctggcctgaagcacgaggacaaacgtggaggtagcggatctcacaactggggaactgtcaaagacgaattaacagagtcccccaaatacattcagaaacaaatatcttataattacagtgacttggatcaatcaaatgtgactgaggaaacacctgaaggtgaagaacatcatccagtggcagacactgaaaataaggagaatgaagttgaagaggtaaaagaggagggtccaaaagagatgactttggatgagtggaaggctattcaaaataaggaccgggcaaaagtagaatttaatatccgaaaaccaaatgaaggtgctgatgggcagtggaagaagggatttgttcttcataaatcaaagagtgaagaggctcatgctgaagattcggttatggaccatcatttccggaagccagcaaatgatataacgtctcagctggagatcaattttggagaccttggccgcccaggacgtggcggcaggggaggacgaggtggatgtgggcgtggtgggcgcccaaaccgtggcagcaggaccgacaagtcaagtgcttctgctcctgatgtggatgacccagaggcattcccagctctggcttaactggatgccataagacaaccctggttcctttgtgaacccttctgttcaaagcttttgcatgcttaaggattccaaacgactaagaaattaaaaaaaaaaaagactgtcattcataccattcacacctaaagactgaattttatctgttttaaaaatgaacttctcccgctacacagaagtaacaaatatggtagtcagttttgtatttagaaatgtattggtagcagggatgttttcataattttcagagattatgcattcttcatgaatacttttgtattgctgcttgcaaatatgcatttccaaacttgaaatataggtgtgaacagtgtgtaccagtaaaaaaaaaaaaaaaaaaaaaaaaaaaaaaaaaaaaaaaa

SEQ ID NO: 637 - DNA, 1475 bp, Homo sapiens
gctttccagtggacctgggctgttgttgcggttgttttccttctctccgtgcaacgctggcaagtctcaaagtcgccacagaaacatgcccctgattcagtgcctctgcttagctgtaacatgttaatcagaactacctggcatcttcctgaacaagactttcaataggggccagtatgcttcgcttcatccagaagttttctcaagcatcttcaaagatactgaagtactctttcccagtgggactaagaaccagcagaacagatatactttctctcaagatgtctctccagcaaaacttttccccatgtccaaggccttggctttcctctcatttccagcgtatatgagcaagacacagtgctatcatacatccccctgcagctttaaaaagcagcagaagcaagcacttctagccagaccctcaagcaccatcacttacctaactgacagcccaaagccagcattatgtgtaactctggcaggactaatccccttcgttgctccaccactggtcatgctgatgacaaaaacttatattcccatattagcttttactcagatggcttatggagccagtttcctatctttcttgggtgggatcagatggggttttgctctaccagaaggtagtccagccaaaccagactaccttaatttagctagcagtgcagctcctcttttcttttcatggtttgccttccttatttctgaaagacttagtgaagccatagtcacagtaataatgggtatgggagtagcattccaccttgaactttttctcttaccacattatcccaactggtttaaagccctgaggatagtagtcactttattggccactttttcatttataatcactttagtagttaaaagtagttttccagaaaaaggacataagagacctggtcaagtataaaaaatataaaagtctgggaagtgaggagcacctctgcccagctgctgccccgtctgggaagtgaggagcgcctctgcctggccgcctgaccatctgggaagtgtgacaagcgcctctgcccggccgctgtgcaaccttccacgtgtgaagtgacagccttgtgtgtgatcttttctgtcttccccaagtttgcattttcgacattaaagtttactttttagttaaaagtttaaaaatatatatataaatacactgtagataacatttgtatgccagctacacctttttctacttctgtttggctttttttccccacaccaatggtaatttatcttcacagattgttcttcatttctagaaattgttacttcatggtaattacttgagcaaaagcttgaaaatccctgacaagtacttttcatctcatagtatattagttttcactcagtcattttatgaataatatagttatccacttaaacatttcaatattttaaccatcttgaaaattaaagattaaaaatccaaaaaaaaaaaaaaaaaaaaaaaaaaaaaa

SEQ ID NO: 638 - DNA, 680 bp, Homo sapiens
gtcagactgggattaatgacagcatgattttcaatgactgtaaatgcgataaggaaatgtactgatgccaatacaccccaccctcattacatcatcaggacttgaagccaagggttaacccagcaagctacaaagagggtgtgtcacactgaaactcaatagttgagttggctgtgttgcaggaaaatgattataactaaaagctctctgatagtgcagagacttaccagaagacacaaggaatgtactgaagagctattacaatccaaatatgccgtttcataaatgtaataagtaatactaattcacagagtatgtaaatggtggatgacaaaagaaaatctgctctgtggaaagaaagaactgtctctaccaggtcaagagcatgaacgcatcaatagaaagaactcggggaaacatcccatcaacaggactacacacttgtatatacattcttgagaacactgcaatgtgaaaatcacgtttgctatttataaacttgtccttagattaatgtgtctggacagattgtgggagtaagtgattcttctaagaattagatacttgtcactgcctatacctgcagctgaactgaatggtacttcgtatgttaatagttgttctgataaatcatgcatttaaaataaagtgatgcaacatcttgtaaaaaaaaaaaaaag

SEQ ID NO: 639 - DNA, 847 bp, Homo sapiens
tggacttggaggcaaattctgcaggtgtatgtgattctcaggcctagagagctaagacacaaagacctccacatctgtcgctgagagtcaagaacctgaacagagtttccatgaaggttctccaagcactagaagggagagtgtctaaacaatggttgaaaagcaaaggaaatataaaacagacacctctttccatttcctaaggtttctctctttattaagggtggactagtaataaaatataatattcttgctgcttatgcagctgacattgttgccctccctaaagcaaccaagtagcctttatttcccacagtgaaagaaaacgctggcctatcagttacattacaaaaggcagatttcaagaggattgagtaagtagttggatggctttcataaaaacaagaattcaagaagaggattcatgctttaagaaacatttgttatacattcctcacaaattatacctgggataaaaactatgtagcaggcagtgtgttttccttccatgtctctctgcactacctgcagtgtgtcctctgaggctgcaagtctgtcctatctgaattcccagcagaagcactaagaagctccagcctatcacctagcagataaaactatggggaaaacttaaatctgtgcatacatttctggatgcatttacttattctttaaaaacaaaggaatcctatgaactgaattggggcacaaaaaattaatctaggtggtaacattacaatctcttgggacacttcaagagatccccaggatttggtgactgggatttaaaggtgccaatgtttaccgattacaaacagacagataactcgcggtgttaaaacagtca

SEQ ID NO: 640 - DNA, 542 bp, Homo sapiens
tccattcataatgcagtcccattaggtgacaggttccactgcatggcctaaaattaatcaatgtttatcggctgcataaaggatgttgtagtgggatgttttatagagcaggtaaacggaaggggtggcggcctcagggaacacgtggtggttcagggcggtatccatctcgtccacgtactccacttgcagggcaatgctcagggcctgcgacaacgccgtgatctggatgtggtcacactccgtggccatgggctctacttcgtgagtgcagaagtctttgatgtccatctcctcatcaatgaagtgccggaagaagtctgctcggttcctgatgaaggccgacgtgagcaggcgcaggaactgcacgatgtggtccgaggcactctggtcgttgaacaccttcagcaggctggacactgagccgtccttctctaccagttccaccacactgtaaaaagcattgaagaagtttctgaacttgtgctcctcaaagccagcagccagaaggtcatttggggtctgcagtacgcgttctttga

SEQ ID NO: 641 - DNA, 590 bp, Homo sapiens
catttatattttttatttttattattactttcagatacagggtctctcactattttgcccaggttggactgctgggctcaatggatcctccccgcctcagcctcctgagtggctgggattacaggcatgcaccacgcccagtgctacaattttttttttaaaaaagcccggaaacacaatgggcttgcatcgtgttggcagcaggtgcctctcagctggtgctggacagaaggggcttgcagtatttgcactgaatccaaacccggtacattgtcagttgctttcctcggttcacctgcagtcggcgatccaccaggttctgaactttttccagtccagcagtggtgaaaagcgtgtccagttccttgtgtgaagaagtaaactctggttccatcacctctcacgtagaaatttccagatagacactgaccttttttaaaccgaagctgagccatgtcatagcggccgtaatctcgcagaagcatcatcccgccaggtttcagaagcctgctcagcctgttgatagccttctgcatcttgtctggaacaattgctgaaagaacaaatatgagaatgataatatcaagact

SEQ ID NO: 642 - DNA, 468 bp, Homo sapiens
  misc_feature (1)..(468): n = a, t, g, or c
tcttcgcttctagggcatctgctttttctctttttaatttagccttttcaaaagccagtgacttcatttcttcttgtttcaaaagtttatctctttctttagtagctttgctcctataacttgcaagagtctgtttattagcaacattgtcctcttgactaatatgtattcgtttgggaggtctccctcttcgtctgttagcaggactgaagataaatgtgggtggatcatcagggaagaaataagaaaaatcttgttctgctattttatacgttgaaagagatgatgcctttattttaatgactccatcttgtggttcacagtgttgcttcagaaaaagctttagtttatcacgagaaaataggtgttttctccggctgatttgtgttgctttaacaatagcagactcatgtaattcntttttagtgggttgcactttatacttgaatagtaagggatcaattgcat

SEQ ID NO: 643 - DNA, 577 bp, Homo sapiens
tgccagcatcaagatgagatattgtatttccaaacaaggtcacatacacaaaaaaagtagagatgctcaataaatgcttaatatcacctctttcttaataccttcccttcatgttctaagtcagaacccatcattcgctattcctcacccccagaacattctggatgtaccttccaccttcattccagcatttccttccagccagcataatctttgcatgtgtttctctcctgaccacacttagagctctcgagggtagaaagacatctttatcatccttacagctcttatggtgtctggcttgcattttgtgctcagtgatgttcaactcaataagcacaggtccagcctggttgaatgaaacgcttattgtgtgaagcctctcttcctgttgcagtgaggctgtcagttcctggtctgatacttcttttgcctagcacagggctgcatgcatagcagaccgtacaccagtgtgtgctgatccattgatgttaaagtttcgaagttgaatggtcaagctcagagtcattcttcctccctgcatgcctgcaccagacactcccttcaagtgcgcgca

SEQ ID NO: 644 - DNA, 486 bp, Homo sapiens
caacagaaaacaagtttaatgcaacaggtgacaacggtctggagcgagtccatgctccggaaggctcagtctgtggcagtcccgtggctcaagacaggctgaggccggctgcaatggaggccagcagcaggaggatggccagccacagcccaccacagctctcacccatgctcccagcatattctttgaacactgatgagttgataggtggcccctctaaattgcagtagcgaattttacaacacttgaggtaaaagaagggcatgggctcttccaggagaaaccgcttctcctctggcttgggtctctccatcgctgcacaaccagcggagactgcttcgcaaccatgaaaaaacgtggaaatattttcacggccgctataacgcagtatggctctgtccatttgcacctccttgggttctggcactcgaaagtgttttctctctcacaaacatgacaccacactctattgtcaccctcgtccgt

SEQ ID NO: 645 - DNA, 440 bp, Homo sapiens
  misc_feature (1)..(440): n = a, t, g, or c
taaagaatactgcagtttatcaaaagacataagaaatttcaactcatacttggagagttataaaaatcaatgttttggctaagttataaacatgtttataatgcaattatttgcataactctagtaatgctaatggcggctataagattaggtttctaaaaaaccactaaaaacataaaaatacttagcctcattatttccctgtagaacgtattgatttacacctaaatttcagtatttactatatcatcattgctgattttaagtcacattcaaaggataaggcaaaaccacctacgaattggcatatttgtttatttctcagtttgtgaaaatgtccttaatttgttgatgtagcaaacaaatttcaactttgattgctatgcaaaaaaacaagataatctgctttgcaatgaactttatatagttcaactgcatan

SEQ ID NO: 646 - DNA, 457 bp, Homo sapiens
ttttttaaaaacatcatttatttaagagttcatataaagttacacttatgttctgaaggaggcattatggtgggacaaatattaacaaagcatgatttaaatatatatatatttaatgtgtgatatgtttgtatatatatttaaacacatgcaattgttctacaatttaccagattggtgccacagtgaataaaagagaaagtagacagcttttgctggaagattcaactaaagtgcctaatacgtgaaaatctaaaactaatattagaaaaatgtcacaagagatgcccaggccttcagctttctggaccatgaaagtgtcaccaaattcaaagaacatttctgaatgtacatccagtgacatctgttatgcaaaagaggaaaactttgtgaaacatttcatagctttggtcaatgatttactttttgtccatgtattgataaatcagtcacttct

SEQ ID NO: 647 - DNA, 640 bp, Homo sapiens
ttttttccagttcaacaaatctttactcagtgcctctcaagcattctattttattttaagcattctattttaaattaataaaagttattaatattaattttaaaaaacctattgtgtatgattcattaatggttgtatcagatcatgtaaaacgtttccagtttaacaaatctttacaaagtgcctcttacgcgttctattttaaattaataaaagtaattactaaaagttattaatttttaaaaacctattgtgtatgatccattaatgattgtatcaaataccctatgcaactaaaaataacacctatgatcacatttaaatcaagagctatgtatagtctaaggattttttaacatatctttgaaaatatgcaaaatggaaaagaaatctatgattgccttgatgacatttacagcaattacaaagagatttcttctgaaatgcaaactatctgctttccaatgttacctcctgtcatcatggactggaatgcagctcccatgttttccaacccatttattaccgtctctttaatctttagctttccttctttaaaccactgactcagctgtagaatgccaggctcaaatttgtctttataatttaataccagagatctttcccttgtgatgttctt

SEQ ID NO: 648 - DNA, 524 bp, Homo sapiens
  misc_feature (1)..(524): n = a, t, g, or c
ttnttttttttttttttttttttttttccaatagtttgactttattaaatcaatagaacgggatctcagtggttaagccgtcttaacagggccaggtctcttgaggtagtttttgggccatcagttaattacatcgactttccaggaaacagactatggagaatgagaggaatcagactgcctgtcacacacctctcatggaaccccctagtgacacctataaggacgttacagatctagttccagactttacagatctagttctattttctcaagttacagatggggaaactgaggccccagcagggggaggggatgtatctaagtcactagtgagttggcggcagtcaggtctcttgattcttttccccatactctcagcccaacttctcagtggagaggggctggcaggcctgctctctggatagaatgtagcaaaaggcccgtggtcaaactgatacggggtggggaaggttggtgggctctcagccatcagccattctcatcttacacgtgaaaaactc

SEQ ID NO: 649 - DNA, 543 bp, Homo sapiens
gaagtcaatagattgaaggcaaaagaacacagagctttcacaagctcaaagaaaaatatttgctggctgatcgctgatttgtatgcactataaaacaattccataaataaaaccaatatatcatttcttaatcatgaccctatcaaaaccaagttatttcctaactattctttcaatgtcaaatgtaccctagagttgacgtttcatttttaagggttacagctacctcataggaactgaactagatgtactcttaccctttctctgaagtataacagtacaccactgcacaacagtatccaatttgaagactaatggtaaagaaaattcttcaggaaaaactgaaaatccatcaagctgaaaatctaaaattagttctactttctaatgaaaaatacataaaagtgcatcatcagaataagtaattcttatgccagtttgtattgcaaattttccaaacaatgcatcaaacataaacccaatccagatgtcaattatgaatacaaatatagcttgaggttgttttttttaaaggcagtaatt

SEQ ID NO: 650 - DNA, 458 bp, Homo sapiens
tttttcagatttttagctttatttcagaaataaacctttaaaagtaaaaacaatactggaactttatttcaataatatcccaagttatgggactaagttgatggttctgaaagtttacacagttgttctacatacagtcacatgctgcattatgacgttttggtcaataacagaccacaaatataatggtgctcccagaaggttacaataccatatttttactgtacattttctatgtttaaatatacagataccattgcattacaattgcctatggtattcagcaaagtaacatgctgtacacgtttgtagtgggagcaggaggctctaccacatagcctaggtgtgtggtaggctctagtatttaggtttgtgtaagtacattctgtggatgcttgcacagcaacaaaatcacctgatgatgcatttctcacaacatatccttggtccattaaagt

SEQ ID NO: 651 - DNA, 558 bp, Homo sapiens
  misc_feature (1)..(558): n = a, t, g, or c
ttctaagatgaaatgtaaaaaagaaaaagaaaaaacaaaaagcaacacgcttctagaaagccattcatcttatctcataaaattaattccccagagttatctcatgtagtagcagcattatcaaatagtgcaattcttcaaaattgatttcaaataatatctttctaaaataaattacatttacttacagctgtgcttataaaaccacagcttaaaacacttagccctcaaatgggtaaattactataagcaataactgtcttgtctacatggtaatgaaatgcacgtgcacgcacacatgtgtgtgtgaaggccaaagataccgcaacaaggtaaaaacatgtaatattaaataaaaagtaaacagtacataatggaatttttagttttggtacttctaatcatattcccgtcaataataagaactataaataggtaattgttaaattaagcatctatgtaagaaaaggcaaggagctatatactaaagaacagtgataatttgtatgtntcatgctatataacctataaagtacatgcaaaacagcatgatcctga

SEQ ID NO: 652 - DNA, 1455 bp, Homo sapiens
attcttaaaggcgcccgagtgtaggcgacaggccgctgacggccggaaggaaaatgagtgagtctttggttgtttgtgatgttgccgaagatttagtggaaaagctgagaaagtttcgttttcgcaaagaaacgaacaacgctgctattataatgaagattgacaaggataaacgcctggtggtactggatgaggagcttgagggcatttcaccagatgaacttaaagatgaactacctgaacgacaacctcgcttcattgtgtatagttataaatatcaacatgatgatggaagagtttcatatcctctgtgctttattttctccagtcctgttggatgtaagcctgaacaacagatgatgtatgctggaagtaagaataagctagtccagacagctgaactaaccaaggtatttgaaataagaaataccgaagacctaactgaagaatggttacgtgagaaacttggatttttcactaatgtgaacttctgtgtttctaaagtatttatgtattaacctgaccatactggaatcagacataaatacttatttatgcctaaaaatgcactgttacttacagtttgtttcctgcagtaaagaaaaattcttcatttgtgcaaaatttgaacaaagaggaaatcatcttcatagtaatgaaactttgtaaagtgtttccttatattggtaattgttaggtggactacttttctccagggactttttgcactcttgtgactaatttctataacttatggttcggaatttgttactatttacagacaccattggaaagtggatatattagattgtgagagacaacagttgcctccttttgacaaatactggatattagcagtttatttatgaaaatagcgtattatcacttgtcaaatcattgaaattcatttggggtcaaagacttgagtgacccagtattgagccatgaataatttagtgtaacctgtattacaagtacattgatgaattctgtatcttctttggtttcctgtatctttttaatcaagtctagaaactatgttcatcagtcactcatttttaaggtcgggagttagattttatgatagaattatgactgttagcttttctccttatagcatcttagtcttagaaattggtgggttgtaataatcaagggcttcattccttttatgtcatttctagacagttttgaatctaggttaataacactttatttataaagcacctcaatgtcctgtgaacactaattattttaaatgtgttaatactgtgcctttgatttgttagctttaaagttagtttaagacttttacactgccagtattccacatttggtgaaattagtacttttttaaagggtccaaataaaataattttctaatgtgtatatctgaaatttgtaataaaatcaacttcatattgcaaaaaaaaaaaaaaaaaaaaaaaaaaaaaa

SEQ ID NO: 653 - DNA, 525 bp, Homo sapiens
aatccttttatcctcttgggtgttgttagactgagtcacatttctaattgtatgataaattgaaaatgttggcaggaacttaacttttgtaaaatttgagctttttaatgttactttgattgtctttctggtggatttcttcgccgctacccttgcagttctccactccgactatagagctcccttctctgttctcgcagataggcgctcatactgatggcatgggaggacgattcgaacttgaaaagagaattttttggcctttgaggtttcttcttggcaaaaaaggctgcaaactctcgtccagtgctggcatagcttagttgagctgatggttcagaggccgtacgagtatttttcatatccaagtactcagttaatagcatctgtagaacatcttggatcttcacccatacatctgccatatcatacagtttgatatcttcctgctgagtcagttggagtcactacagtgtcccgcaagtatcccaggaccacagaatgtgcagcggctacagcattaaa

SEQ ID NO: 654 - DNA, 506 bp, Homo sapiens
tttttagaattatttgattttattaaaaaagaatcattgtctacaaactgttttctaacaatgcaaatacagtaagcaagtcatctgcaatatcaaaatattgtttgtaaatcactgatggcaccaacgatttgaggaatttccaataggacacatattgagaaaaagcaacagattataggcattaaccaaattttaagatcagaaaattataaaaatcattaagtttaaattatccaattttcaatagcttaaatccaatcatcaggaattcagaagcacccaatatgtttgaagttgcacaaatgcatatggatgataggaaagtaatccccatgcaatatcttaagtgttgctatcagatatatttaagtgctactttacagattaagctgggtaaaatcaaaatatattttacttcccattagattttaaaacaatcacaataatttatcaacagttgccatttcacagcaattagaaaagaggagttgatacaagttgaa

SEQ ID NO: 655 - DNA, 2165 bp, Homo sapiens
gttagcgcctgaacatgcggcagtctgcgggcgacccaggctccggacaggcagcggcggacggcgccggcggaggtggcggcggaggtggcggcggagacggccggcgcccggcgcggagcctagcgaggcagttcagcgcggcctcgggcctggtctagaaggatgctgtcccgacagaaaaccaaaaacgaagtgtccaagccggccgaggtgcaggggaagtacgtgaagaaggagacgtcgcctctgcttcggaatcttatgccttcattcatccggcatggtccaacaattccaagacgaactgatatctgtcttccagattcaagccccaatgccttttcaacttctggagatgtagtttcaagaaaccagagtttccttagaactccaattcaaagaacacctcatgaaataatgagaagagaaagcaacagattatctgcaccttcttatcttgccagaagtctagcagatgtccctagagagtatggttcttctcagtcatttgtaacggaagttagttttgctgttgaaaatggagactctggttcccgatattattattcagacaatttttttgatggtcagagaaagcggccacttggagatcgtgcacatgaagactacagatattatgaatacaaccatgatctcttccaaagaatgccacagaatcaggggaggcatgcttcaggtattgggagagttgctgctacatctttaggaaatttgactaaccatggttctgaagatttaccccttcctcctggctggtctgtggactggacaatgagagggagaaaatattatatagatcataacacaaatacaactcactggagccatcctcttgagcgagaaggacttcctcctggatgggaacgagttgagtcatccgaatttggaacctattatgtagatcacacaaataagaaggcccaatacaggcatccctgtgctcctagtgtacctcggtatgatcaaccacctcctgtcacataccagccacagcaaactgaaagaaatcagtcccttctggtacctgcaaatccatatcatactgcagaaattcctgactggcttcaggtttacgcacgagcccctgtgaaatatgaccacattctgaagtgggaactcttccagctggctgacctggatacataccagggaatgctaaagttgctcttcatgaaagaattggagcagattgttaaaatgtatgaagcatacagacaagcccttcttacagagttggaaaaccgaaagcagagacagcagtggtatgcccaacaacatggaaaaaatttttgagctgattttttaaaaatttaagttttgtaagagctttaaaatattttcacagataaaaaattgcaaacaagtactctggttaataaatgctgcttcctttgtggaaattataaaattctaactttacatgtattttgttattagaaattttcttttattgaatgagaaaaattagtctatcattttaagagccaatatggcaaacactttcaaatactgtatattaggaaactgttttggtattcttgatggaaaaaaatgcagcggaaatgtcattatgaacagatgttaaataggaaattattacttgttaacttcttacagcagtagtaccttctttaaaaaaaaaaaaagaatctgcggtattttttttaaaaaaaagtttactgctgtagtgtgaaatattgtctggaaagggatggtttaaatattaccatgatgtagttgaaatataaaataggatttggaaccttattgtgataaatatttatatatgatgtatgttcgtctcccctctccaaagtaaggaacccagctgggcgtggtggctcactcctgtaatcccagcattttgggaggccgaggtgggtggaccgcttgagtccacgagtttaagaccagcctgggcaacatggtgaagccccatctctacaaaaaatacaaaaaaattagccgggtatgatggtgtgtgcctctagtcccagctacttgggaggctgaggtcagaggatggcttgagccctagaggcagaggttgcagggtcaagatcgcaccacttgcactgcagcccgagagagagagagccagaccttgtcgcaaaaaaaaaaaaaaaaaaaaaaaaaaaaaa

SEQ ID NO: 656 - DNA, 672 bp, Homo sapiens
cttttttttttttttttttttttttttttttggcttaaaagatatcatcaatcttttatttaactaagcactgcccttcattttgaaggaaatgatacaatttcaaatcggaacttccttctcaagaagtgatataagaatgtaacattgatttaacatacaaccttcaacaaaaataaagtttatacaactcactgggaaataaaatgcatgtggaatttatcctgtttgtcaacataattcttcatgagtcacaagtattatagccaagaacaaaacaacaaaaagctgaatcagttgatagttactctgatttaaaaaacatttcacaaataagatgtagctttccaaacaaatccattcgatgaccattatcacaactatattttattctaatttataaaacaaaaaatggttagacaagcacatgatatcaagagtcttcaacacagtggattccattttattaagaaaaaaaatagaaaacaagtagtccttaaattgtcttagctctccatagcatacgttatataaaattaaagttttgcttccaaaaatatgtttccatgtggtcgtggtgttgtccagtgctattagggccaaagcaccaaagacatgagaagtttaaccatcgacttgtcatttttcataaaaactaaacatttccttata

SEQ ID NO: 657 - DNA, 1836 bp, Homo sapiens; identical to SEQ ID NO: 7

SEQ ID NO: 658 - DNA, 10211 bp, Homo sapiens; identical to SEQ ID NO: 6

SEQ ID NO: 659 - DNA, 454 bp, Homo sapiens; identical to SEQ ID NO: 232
  misc_feature (1)..(454): n = a, t, g, or c

SEQ ID NO: 660 - DNA, 337 bp, Homo sapiens; identical to SEQ ID NO: 104

SEQ ID NO: 661 - DNA, 648 bp, Homo sapiens; identical to SEQ ID NO: 4

SEQ ID NO: 662 - DNA, 2384 bp, Homo sapiens; identical to SEQ ID NO: 3

SEQ ID NO: 663 - DNA, 492 bp, Homo sapiens; identical to SEQ ID NO: 9
  misc_feature (1)..(492): n = a, t, g, or c

SEQ ID NO: 664 - DNA, 980 bp, Homo sapiens
tgccgtgcggccgccgcggaataataagccgggatctaccataccattgactaactatggaagattataccaaaatagagaaaattggagaaggtacctatggagttgtgtataagggtagacacaaaactacaggtcaagtggtagccatgaaaaaaatcagactagaaagtgaagaggaaggggttcctagtactgcaattcgggaaatttctctattaaaggaacttcgtcatccaaatatagtcagtcttcaggatgtgcttatgcaggattccaggttatatctcatctttgagtttctttccatggatctgaagaaatacttggattctatccctcctggtcagtacatggattcttcacttgttaagagttatttataccaaatcctacaggggattgtgttttgtcactctagaagagttcttcacagagacttaaaacctcaaaatctcttgattgatgacaaaggaacaattaaactggctgattttggccttgccagagcttttggaatacctatcagagtatatacacatgaggtagtaacactctggtacagatctccagaagtattgctggggtcagctcgttactcaactccagttgacatttggagtataggcaccatatttgctgaactagcaactaagaaaccacttttccatggggattcagaaattgatcaactcttcaggattttcagagctttgggcactcccaataatgaagtgtggccagaagtggaatctttacaggactataagaatacatttcccaaatggaaaccaggaagcctagcatcccatgtcaaaaacttggatgaaaatggcttggatttgctctcgaaaatgttaatctatgatccagccaaacgaatttctggcaaaatggcactgaatcatccatattttaatgatttggacaatcagattaagaagatgtagctttctgacaaaaagtttccatatgttatg

SEQ ID NO: 665 - DNA, 553 bp, Homo sapiens; identical to SEQ ID NO: 15
  misc_feature (1)..(553): n = a, t, g, or c

SEQ ID NO: 666 - DNA, 1055 bp, Homo sapiens
gcgatcttatcaagctttttgggaggtataaaacaaaatccccattttttccttggatttagttcctcaggaacagagaactttgcaattgatgatctcaactctgcatcatctggtgactcctgattctgcaggactaagacatttcccaagagttctgctgcatcagccagtgaggacaagagttcttcagtgcggttcagctcaaggacacctaggcttccccagcagggggcttgcttgcaggtctgacaaaccacagagcgttgagcagatggcctgggactcccagacctggcagagggttttattagggcccgcctggcctgcaccgtttcatccaagtaccctgacccagcactcatcttccctggcattctctgttatccaccagctcctctgcacacctcagcgtctacttccacgaacttctaaacatcaaaaggtacaatggccagggtgcggcaggagagtcgggggcagggcagccttcaaatccacactattgaatccacacgatggaaagaagagaacagatggggaagttctccagagatcatgagatgcatccaggcagtgttctcatgtgagaggatagggaggccaaaaactaaaattgctatcagcccccgccgctgtctggtacgcgaggaaactttccgaggactttacaagcatagttgcaaaatgctagtaggtctgggactcttcaactttctcttctagggccacagtagactccggtgtactgcctttctggccgcacctgggtatgggtgacaagagggcccccttccgaccctgcgcaagtgtcagactccagcgtgggcccttgcaccggactgccacaagcctgaagcaaaaaatccgtacttgttgcccacctgaatgccttgctcagcgcaggcctacacctggcttccacatttacggaccactaaaactttattgcaaccttgttgacccaggtctattacacaccaggaatccttcagaagccccattcgcctcacatggacacactcggtaaccagcgggcggcacaacctctccag

SEQ ID NO: 667 - DNA, 3492 bp, Homo sapiens; identical to SEQ ID NO: 23

SEQ ID NO: 668 - DNA, 473 bp, Homo sapiens; identical to SEQ ID NO: 134
  misc_feature (1)..(473): n = a, t, g, or c

SEQ ID NO: 669 - DNA, 840 bp, Homo sapiens; identical to SEQ ID NO: 26

SEQ ID NO: 670 - DNA, 1484 bp, Homo sapiens
tggaagcgcgtgcttttgtttgtgtccctggccatggcgctgcagctctcccgggagcagggaatcaccctgcgcgggagcgccgaaatcgtggccgagttcttctcattcggcatcaacagcattttatatcagcgtggcatatatccatctgaaacctttactcgagtgcagaaatacggactcaccttgcttgtaactactgatcttgagctcataaaatacctaaataatgtggtggaacaactgaaagattggttatacaagtgttcagttcagaaactggttgtagttatctcaaatattgaaagtggtgaggtcctggaaagatggcagtttgatattgagtgtgacaagactgcaaaagatgacagtgcacccagagaaaagtctcagaaagctatccaggatgaaatccgttcagtgatcagacagatcacagctacggtgacatttctgccactgttggaagtttcttgttcatttgatctgctgatttatacagacaaagatttggttgtacctgaaaaatgggaagagtcgggaccacagtttattaccaattctgaggaagtgcgccttcgttcatttactactacaatccacaaagtaaatagcatggtggcctacaaaattcctgtcaatgactgaggatgacatgaggaaaataatgtaattgtaattttgaaatgtggttttcctgaaatcaggtcatctatagttgatatgttttatttcattggttaatttttacatggagaaaaccaaaatgatacttactgaactgtgtgtaattgttccttttatttttttggtacctatttgacttaccatggagttaacatcatgaatttattgcacattgttcaaaaggaaccaggaggtttttttgtcaacattgtgatgtatattcctttgaagatagtaactgtagatggaaaaacttgtgctataaagctagatgctttcctaaatcagatgttttggtcaagtagtttgactcagtataggtagggagatatttaagtataaaatacaacaaaggaagtctaaatattcagaatctttgttaaggtcctgaaagtaactcataatctataaacaatgaaatattgctgtatagctccttttgaccttcatttcatgtatagttttccctattgaatcagtttccaattatttgactttaatttatgtaacttgaacctatgaagcaatggatatttgtactgtttaatgttctgtgatacagaacagattaatactccctttttatcattacagttagctaaaaaattgccaggcagtccacaaaacagaatttgctttaagaccaacccacagagtcagctggagactaacggcgctggggcctgctgggccgggatatagtcgtgtttagctaagtgtcgagagcattaagaagaaagtcctggttggaggcgcaaggcctgcagcaccagctgtggaatccccaataatgt

SEQ ID NO: 671 - DNA, 1546 bp, Homo sapiens; identical to SEQ ID NO: 27

SEQ ID NO: 672 - DNA, 836 bp, Homo sapiens; identical to SEQ ID NO: 28

SEQ ID NO: 673 - DNA, 539 bp, Homo sapiens; identical to SEQ ID NO: 30
  misc_feature (1)..(539): n = a, t, g, or c

SEQ ID NO: 674 - DNA, 4539 bp, Homo sapiens
cggcgcgcacactgctcgctgggccgcggctcccgggtgtcccaggcccggccggtgcgcagagcatggcgggtgcgggcccgaagcggcgcgcgctagcggcgccggcggccgaggagaaggaagaggcgcgggagaagatgctggccgccaagagcgcggacggctcggcgccggcaggcgagggcgagggcgtgaccctgcagcggaacatcacgctgctcaacggcgtggccatcatcgtggggaccattatcggctcgggcatcttcgtgacgcccacgggcgtgctcaaggaggcaggctcgccggggctggcgctggtggtgtgggccgcgtgcggcgtcttctccatcgtgggcgcgctctgctacgcggagctcggcaccaccatctccaaatcgggcggcgactacgcctacatgctggaggtctacggctcgctgcccgccttcctcaagctctggatcgagctgctcatcatccggccttcatcgcagtacatcgtggccctggtcttcgccacctacctgctcaagccgctcttccccacctgcccggtgcccgaggaggcagccaagctcgtggcctgcctctgcgtgctgctgctcacggccgtgaactgctacagcgtgaaggccgccacccgggtccaggatgcctttgccgccgccaagctcctggccctggccctgatcatcctgctgggcttcgtccagatcgggaagggtgatgtgtccaatctagatcccaacttctcatttgaaggcaccaaactggatgtggggaacattgtgctggcattatacagcggcctctttgcctatggaggatggaattacttgaatttcgtcacagaggaaatgatcaacccctacagaaacctgcccctggccatcatcatctccctgcccatcgtgacgctggtgtacgtgctgaccaacctggcctacttcaccaccctgtccaccgagcagatgctgtcgtccgaggccgtggccgtggacttcgggaactatcacctgggcgtcatgtcctggatcatccccgtcttcgtgggcctgtcctgcttcggctccgtcaatgggtccctgttcacatcctccaggctcttcttcgtggggtcccgggaaggccacctgccctccatcctctccatgatccacccacagctcctcacccccgtgccgtccctcgtgttcacgtgtgtgatgacgctgctctacgccttctccaaggacatcttctccgtcatcaacttcttcagcttcttcaactggctctgcgtggccctggccatcatcggcatgatctggctgcgccacagaaagcctgagcttgagcggcccatcaaggtgaacctggccctgcctgtgttcttcatcctggcctgcctcttcctgatcgccgtctccttctggaagacacccgtggagtgtggcatcggcttcaccatcatcctcagcgggctgcccgtctacttcttcggggtctggtggaaaaacaagcccaagtggctcctccagggcatcttctccacgaccgtcctgtgtcagaagctcatgcaggtggtcccccaggagacatagccaggaggccgagtggctgccggaggagcatgcgcagaggccagttaaagtagatcacctcctcgaacccactccggttccccgcaacccacagctcagctgcccatcccagtccctcgccgtccctcccaggtcgggcagtggaggctgctgtgaaaactctggtacgaatctcatccctcaactgagggccagggacccaggtgtgcctgtgctcctgcccaggagcagcttttggtctccttgggccctttttcccttccctcctttgtttacttatatatatattttttttaaacttaaattttgggtcaacttgacaccactaagatgattttttaaggagctgggggaaggcaggagccttcctttctcctgccccaagggcccagaccctgggcaaacagagctactgagacttggaacctcattgctacgacagacttgcactgaagccggacagctgcccagacacatgggcttgtgacattcgtgaaaaccaaccctgtgggcttatgtctctgccttagggtttgcagagtggaaactcagccgtagggtggcactgggagggggtgggggatctgggcaaggtgggtgattcctcccaggaggtgcttgaggccccgatggactcctgaccataatcctagccccgagacaccatcctgagccagggaacagccccagggttggggggtgccggcatctcccctagctcaccaggcctggcctctgggcagtgtggcctcttggctatttctgttccagttttggaggctgagttctggttcatgcagacaaagccctgtccttcagtcttctagaaacagagacaagaaaggcagacacaccgcggccaggcacccatgtgggcgcccaccctgggctccacacagcagtgtcccctgccccagaggtcgcagctaccctcagcctccaatgcattggcctctgtaccgcccggcagccccttctggccggtgctgggttcccactcccggcctaggcacctccccgctctccctgtcacgctcatgtcctgtcctggtcctgatgcccgttgtctaggagacagagccaagcactgctcacgtctctgccgcctgcgtttggaggcccctgggctctcacccagtccccacccgcctgcagagagggaactagggcaccccttgtttctgttgttcccgtgaatttttttcgctatgggaggcagccgaggcctggccaatgcggcccactttcctgagctgtcgctgcctccatggcagcagccaaggacccccagaacaagaagacccccccgcaggatccctcctgagctcggggggctctgccttctcaggccccgggcttcccttctccccagccagaggtggagccaagtggtccagcgtcactccagtgctcagctgtggctggaggagctggcctgtggcacagccctgagtgtcccaagccgggagccaacgaagccggacacggcttcactgaccagcggctgctcaagccgcaagctctcagcaagtgcccagtggagcctgccgcccccacctgggcaccgggaccccctcaccatccagtgggcccggagaaacctgatgaacagtttggggactcaggaccagatgtccgtctctcttgcttgaggaatgaagacctttattcacccctgccccgttgcttcccgctgcacatggacagacttcacagcgtctgctcataggacctgcatccttcctggggacgaattccactcgtccaagggacagcccacggtctggaggccgaggaccaccagcaggcaggtggactgactgtgttgggcaagacctcttccctctgggcctgttctcttggctgcaaataaggacagcagctggtgccccacctgcctggtgcattgctgtgtgaatccaggaggcagtggacatcgtaggcagccacggccccgggtccaggagaagtgctccctggaggcacgcaccactgcttcccactggggccggcggggcccacgcacgacgtcagcctcttaccttcccgcctcggctaggggtcctcgggatgccgttctgttccaacctcctgctctgggaggtggacatgcctcaaggatacagggagccggcggcctctcgacggcacgcacttgcctgttggctgctgcggctgtgggcgagcatgggggctgccagcgtctgttgtggaaagtagctgctagtgaaatggctggggccgctggggtccgtcttcacactgcgcaggtctcttctgggcgtctgagctggggtgggagctcctccgcagaaggttggtggggggtccagtctgtgatccttggtgctgtgtgccccactccagcctggggaccccacttcagaaggtaggggccgtgtcccgcggtgctgactgaggcctgcttccccctccccctcctgctgtgctggaattccacagggaccagggccaccgcaggggactgtctcagaagacttgatttttccgtccctttttctccacactccactgacaaacgtccccagcggtttccacttgtgggcttcaggtgttttcaagcacaacccaccacaacaagcaagtgcattttcagtcgttgtgcttttttgttttgtgctaacgtcttactaatttaaagatgctgtcggcaccatgtttatttatttccagtggtcatgctcagccttgctgctctgcgtggcgcaggtgccatgcctgctccctgtctgtgtcccagccacgcagggccatccactgtgacgtcggccgaccaggctggacaccctctgccgagtaatgacgtgtgtggctgggaccttctttattctgtgttaatggctaacctgttacactgggctgggttgggtagggtgttctggcttttttgtggggtttttatttttaaagaaacactcaatcatcctag

SEQ ID NO: 675 - DNA, 538 bp, Homo sapiens
actttttaaatgaaataatatgctttattttaaccgttctggaacaaaagcaaatgaaaatcgactcagaatatcaacagacattcctttatagattctcaaagcacaaagaaatttgtatgattttatagtactaaccgctgcattttacagatgaaactaattccctgaagggtgtggtgattgccaatatgacttagcaaatcagtggcagagccaggtgtaagagcccaagtctcttgtcttctaccaggtatttattcgtttcactaccctactatccctatctgtggtttaagaataataccagaggagataaattgtttcaccctttcaaaacaatgtaaaaattaccttctaatcgagtatttggtatttactgctcaatgatcaactagaaaaaatatataatactagatgggatctaatatattctaaattctttaactggtaacttgtcaatttaaatgtctttgaactacgcttagagttgtaacatcaaatgctatagaaacaggctgtgaaaatctaaatgtct

SEQ ID NO: 676 - DNA, 773 bp, Homo sapiens; identical to SEQ ID NO: 39

SEQ ID NO: 677 - DNA, 822 bp, Homo sapiens; identical to SEQ ID NO: 279
  misc_feature (1)..(822): n = a, t, g, or c

SEQ ID NO: 678 - DNA, 599 bp, Homo sapiens; identical to SEQ ID NO: 45

SEQ ID NO: 679 - DNA, 3791 bp, Homo sapiens
acagacggcgggtgaacatggcgtcctcgacttggtctgagacgtgataggcctgccttctggttgaagatgtggcgagtgaaaaaactgagcctcagcctgtcgccttcgccccagacgggaaaaccatctatgagaactcctctccgtgaacttaccctgcagcccggtgccctcaccacctctggaaaaagatcccccgcttgctcctcgctgaccccatcactgtgcaagctggggctgcaggaaggcagcaacaactcgtctccagtggattttgtaaataacaagaggacagacttatcttcagaacatttcagtcattcctcaaagtggctagaaacttgtcagcatgaatcagatgagcagcctctagatccaattccccaaattagctctactcctaaaacgtctgaggaagcagtagacccactgggcaattatatggttaaaaccatcgtccttgtaccatctccactggggcagcaacaagacatgatatttgaggcccgtttagataccatggcagagacaaacagcatatctttaaatggacctttgagaacagacgatctggtgagagaggaggtggcaccctgcatgggagacaggttttcagaagttgctgctgtatctgagaaacctatctttcaggaatctccgtcccatctcttagaggagtctccaccaaatccctgttctgaacaactacattgctccaaggaaagcctgagcagtagaactgaggctgtgcgtgaggacttagtaccttctgaaagtaacgccttcttgccttcctctgttctctggctttccccttcaactgccttggcagcagatttccgtgtcaatcatgtggacccagaggaggaaattgtagagcatggagctatggaggaaagagaaatgaggtttcccacacatcctaaggagtctgaaacagaagatcaagcacttgtctcaagtgtggaagatattctgtccacatgcctgacaccaaatctagtagaaatggaatcccaagaagctccaggcccagcagtagaagatgttggtaggattcttggctctgatacagagtcttggatgtccccactggcctggctggaaaaaggtgtaaatacctccgtcatgctggaaaatctccgccaaagcttatcccttccctcgatgcttcgggatgctgcaattggcactacccctttctctacttgctcggtggggacttggtttactccttcagcaccacaggaaaagagtacaaacacatcccagacaggcctggttggcaccaagcacagtacttctgagacagagcagctcctgtgtggccggcctccagatctgactgccttgtctcgacatgacttggaagataacctgctgagctctcttgtcattgtggagtttctctcccgccagcttcgggactggaagagccagctggctgtccctcacccagaaacccaggacagtagcacacagactgacacatctcacagtgggataactaataaacttcagcatcttaaggagagccatgagatgggacaggccctacagcaggccagaaatgtcatgcaatcatgggtgcttatctctaaagagctgatatccttgcttcacctatccctgttgcatttagaagaagataagactactgtgaatcaggagtctcggcgtgcagaaacattggtctgttgctgttttgatttgctgaagaaattgagggcaaagctccagagcctcaaagcagaaagggaggaggcaaggcacagagaggaaatggctctcagaggcaaggatgcggcagagatagtgttggaggctttctgtgcacacgccagccagcgcatcagccagctggaacaggacctagcatccatgcgggaattcagaggccttctgaaggatgcccagacccaactggtagggcttcatgccaagcaagaagagctggttcagcagacagtgagtcttacttctaccttgcaacaagactggaggtccatgcaactggattatacaacatggacagctttgctgagtcggtcccgacaactcacagagaaactcacagtcaagagccagcaagccctgcaggaacgtgatgtggcaattgaggaaaagcaggaggtttctagggtgctggaacaagtctctgcccagttagaggagtgcaaaggccaaacagaacaactggagttggaaaacattcgtctagcaacagatctccgggctcagttgcagattctggccaacatggacagccagctaaaagagctacagagtcagcatacccattgtgcccaggacctggctatgaaggatgagttactctgccagcttacccagagcaatgaggagcaggctgctcaatgcgtaaaggaagagatggcactaaaacacatgcaggcagaactgcagcagcaacaagctgtcctggccaaagaggtgcgggacctgaaagagaccttggagtttgcagaccaggagaatcaggttgctcacctggagctgggtcaggttgagtgtcaattgaaaaccacactggaagtgctccgggagcgcagcttgcagtgtgagaacctcaaggacactgtagagaacctaacggctaaactggccagcaccatagcagataaccaggagcaagatctggagaaaacacggcagtactctcaaaagctagggctgctgactgagcaactacagagcctgactctctttctacagacaaaactaaaggagaagactgaacaagagacccttctgctgagtacagcctgtcctcccacccaggaacaccctctgcctaatgacaggaccttcctgggaagcatcttgacagcagtggcagatgaagagccagaatcaactcctgtgcccttgcttggaagtgacaagagtgctttcacccgagtagcatcaatggtttcccttcagcccgcagagaccccaggcatggaggagagcctggcagaaatgagtattatgactactgagcttcagagtctttgttccctgctacaagagtctaaagaagaagccatcaggactctgcagcgaaaaatttgtgagctgcaagctaggctgcaggcccaggaagaacagcatcaggaagtccagaaggcaaaagaagcagacatagagaagctgaaccaggccttgtgcttgcgctacaagaatgaaaaggagctccaggaagtgatacagcagaatgagaagatcctagaacagatagacaagagtggcgagctcataagccttagagaggaggtgacccaccttacccgctcacttcggcgtgcggagacagagaccaaagtgctccaggaggcctggcaggccagctggactccaactgccagcctatggccaccaattggatccaggagaaagtgtggctctctcaggaggtggacaaactgagagtgatgttcctggagatgaaaaatgagaaggaaaactcctgatcaagttccagagcccatagaaatatcctagaggagaaccttcggcgctctgacaaggagttagaaaaactagatgacattgttcagcatatttataagaccctgctctctattccagaggtggtgaggggatgcaaagaactacagggattgctggaatttctgagctaagaaactgaaagccagaatttgtttcacctctttttacctgcaatacccccttaccccaataccaagaccaactggcatagagccaactgagataaatgctatttaaataaagtgtatttaatgaaaaaaaaaaaaaaaaaaaaa

SEQ ID NO: 680 - DNA, 916 bp, Homo sapiens; identical to SEQ ID NO: 158
  misc_feature (1)..(916): n = a, t, g, or c

SEQ ID NO: 681 - DNA, 995 bp, Homo sapiens; identical to SEQ ID NO: 48

SEQ ID NO: 682 - DNA, 463 bp, Homo sapiens; identical to SEQ ID NO: 53

SEQ ID NO: 683 - DNA, 571 bp, Homo sapiens; identical to SEQ ID NO: 171
  misc_feature (1)..(571): n = a, t, g, or c

SEQ ID NO: 684 - DNA, 521 bp, Homo sapiens; identical to SEQ ID NO: 54

SEQ ID NO: 685 - DNA, 3171 bp, Homo sapiens; identical to SEQ ID NO: 177

SEQ ID NO: 686 - DNA, 3248 bp, Homo sapiens; identical to SEQ ID NO: 65

SEQ ID NO: 687 - DNA, 2253 bp, Homo sapiens; identical to SEQ ID NO: 61

SEQ ID NO: 688 - DNA, 783 bp, Homo sapiens; identical to SEQ ID NO: 59

SEQ ID NO: 689 - DNA, 278 bp, Homo sapiens; identical to SEQ ID NO: 68

SEQ ID NO: 690 - DNA, 666 bp, Homo sapiens; identical to SEQ ID NO: 80

SEQ ID NO: 691 - DNA, 2066 bp, Homo sapiens; identical to SEQ ID NO: 81

SEQ ID NO: 692 - DNA, 900 bp, Homo sapiens
  misc_feature (1)..(900): n = a, t, g, or c
agaagcgggagaattgggcgtcgctctagagatcgatgggctagaggagaagctgtcccagtgtcggagagacctggaggccgtgaactccagactccacagccgggagctgagcccagaggccaggaggtccctggagaaggagaagaaacagcctaatgaacaaagcctccaactacgagaaggaactgaagtttcttcggcaagtagaaccggaagaacatgctgctctctgtggccatctttatcctcctgacgctcgtctatgcctactggaccatgtgagcctggcacttccccacaaccagacacaggcttccacttggccccttgatcaggatcaagcaggcacttcaagcctcaataggaccaaggtgctggggtgttcccctcccaacctagtgttcaagcatggcttcctggcggcccaggccttgcctccctggcctgctggggggttccgggtctccagaaggacatggtgctggtccctcccttagcccaagggagaggcaataaagaacacaaagctgtagaactcaacaaggtgaatcctgtgaaatagagacagtccggagcgttcttgcggggccgggacaagggggaaatctggccgtgctagatgtttcctgggtacgctgttttctgttcaagggtgtatacncagagggaccccaagggggagggagatagctccaggtaggccgtttcccgatattttcgccgcgcaacagtttgggggggacaccacccaaggaggttcaaggccgtttgaccgaccagcatgtggtcgggagaggttgggaaccaggggctcggcagagactatgtgggggcccccgtttgacccatttaggaaaacgactttcaccgatgagttaaggttgaaaacacgtggac

SEQ ID NO: 693 - DNA, 2828 bp, Homo sapiens; identical to SEQ ID NO: 84

SEQ ID NO: 694 - DNA, 560 bp, Homo sapiens; identical to SEQ ID NO: 86

SEQ ID NO: 695 - DNA, 1633 bp, Homo sapiens; identical to SEQ ID NO: 85

SEQ ID NO: 696 - DNA, 513 bp, Homo sapiens; identical to SEQ ID NO: 93

SEQ ID NO: 697 - DNA, 828 bp, Homo sapiens; identical to SEQ ID NO: 91
  misc_feature (1)..(828): n = a, t, g, or c

SEQ ID NO: 698 - DNA, 578 bp, Homo sapiens; identical to SEQ ID NO: 90

SEQ ID NO: 699 - DNA, 730 bp, Homo sapiens
ttgcccagggctgtttatggagcccatcatcaaaggcaggaaaaaccccactcatcacaaagggcatgggggctggggccaggggcttagggccctgcaaaggacaagtagctgggacagcccttcaccccgaccccccatggccactgggaggcaggctgaggaaacaggacagggaatggccaggggcaaaaatttgaacagcccccttccgggtgcaaaaagggccaccaccaagaaggccctgggaattaacccaaaggaagttccccaccccatttcccctttggaccctccaaaataagggccggggagtgagacccaaacctggccccgatggcaggaggcaccctatctgcttccagggccaggaggggtgggtggaatacagtgaggccaaacaaggcaaaagcgggtgcagtagtccctggctactgcccagcttccggaactcccacaggtgggctcagccttggtcctggcagggctgggctcaaaaatacaggctggctcgcttgcgaagtccgagagtcattctgactgggcgtgtgacatggcctccacggcggggctctgctccctggggcctgtccacgcctgctctgccattctgaaggcccaagggcttcggggactggacggctgactacctcgcagccaaaccctcgtctacgctgtacaacgtgccgggcagagaggcaggggtttcttgaacgacctttcctctttc

SEQ ID NO: 700 - DNA, 770 bp, Homo sapiens
ctccgggggtgtcagggaagctgatggagaatcgagctctggatccaggactcgggactcctatggtgccaccagccacctccccaacaagggggccctggcgaaggtcaagaacaacttcaaagacttgatgtccaaactgacggagggccagtatgtgctgtgccggtggacagatggcctgtactacctcgggaagatcaagagggtcagcagctctaagcaaagctgcctcgtgactttcgaagataattccaaatactgggtcctatggaaggacatacagcatgccggtgttccaggagaggagcccaagtgcaacatctgcctagggaagacatcagggccgctgaatgagatcctcatctgcgggaagtgtggcctgggttaccaccagcagtgccacatccccatagcgggcagtgctgaccagcccctgctcacaccttggttctgcgacgctgcatcttcgcactggctgtgcgggtgagccttccatcctccccagtccctgcctctcctgcctcctccagtggggcagaccagagactcccatcatagagcctgagctccaagcaagaagggccacacctgggcttttggagacagatagcgcctctgccactgtccttggccaggatttgtagactccctgagcctcagtttcctcaactgtaaaggtggagatgggttagggtcgggaataaggggccaattaatgatgctttctattaaaaagaaatcttgtttttaaaaaaaaaaaggggggg

SEQ ID NO: 701 - DNA, 504 bp, Homo sapiens
  misc_feature (1)..(504): n = a, t, g, or c
ttactaaattcaagctctgtaattttatggatttatttgcaaatgttctttgtatctcattttatctgtagcagtccccactagtctaccttaaccatcttatagctctggtaaattaaaacttacgtagactttatacaagatccattggccgtattaaacctcccccactcttagggcttagggcggaagggacgaaggcagggctgataggacttttaaaaggataaaaggagtgggggcaagggaggcggaaaatacaggctcttgcagataccctccgcgctgccctccacacccagcccactgctctacaaaggtatgaatgggaatgggcttttctaggaaaagggcttccaaggaacattaaaggaattcctttccctggggaggccccgtgggagggcttgnagccagcctttggaatttggggctttattttcttcaaaattcccttttgattcttgggcattttttcgtccaaacatgggtaccatgtttagg

SEQ ID NO: 702 - DNA, 1658 bp, Homo sapiens; identical to SEQ ID NO: 17

SEQ ID NO: 703 - DNA, 566 bp, Homo sapiens
gggtgccgtccccagaggaggacagaagcagcccgggctgagttggcaccacggagatacggctcacaaactctgtgtgccccaagcagaaggactcgatgctatggggcgccgcggcccagctgactcggatcttctcgtcccggtcggcagtgaggatgaagcggtcatcaggactcacagccacatctaacagcatagacaggtgccccagctctagacggccacacccgtgtggctccagcaccgaaaaggagtagacgtctccagacttgtcggccaccaagaccttctcctccgaggctatgaaagtcagggctgtacacctccttgccacggtcctgacactcagacattgccatggttttgtacggaaaagaatcagacgcttactgtcatcggttaaagcaaaatagctgccagagttggagaaggtggacgccagaatcgcaccgctcccctggtccaagggcgcgtcctcccctttattttcttgtgacttcttttctgcagcactgcagtcatagatgaagaggctgtcatcatcactgcttgctatggaggtg

SEQ ID NO: 704 - DNA, 301 bp, Homo sapiens
gtgtgagcaatatggctgtttatttcacctgggtgcaggcgggctaagtccgaaaagagagtcagcgaagggagataagggtaaggccgttttataggatttgggtaggtaaaggaaaattacagtcaaagggggttacctaaagctcggcatccgtgatggtctacggggcttccgaggcgatcaggcagcatcagtcttcagccgctaagccaagaaggagtcagtcagagagccttgggccagagttccagggggctttgggagtggctgccaggtgagttgaacagtccgatttcca

SEQ ID NO: 705 - DNA, 523 bp, Homo sapiens
  misc_feature (1)..(523): n = a, t, g, or c
gggagcattattgctgnttatttcacctgggtgcaggggggctgagtccgaaaagaaagtcagtgaagggagataagggtggggctgttttataggatttgggtaggtaaaggaaaaaggggggttgttctctggcgggcaggagtaggggtcacaaggtgctcagtaggggagcttttgagccaggatgagctaggagaaggaatttcacaagataatgtcaacagttaaggcaggaacaggccattttcacttcttttgtggtggaatgtcatcagttaaggcaggaaccggccatgtggatgtgtatgtgcaggtcacaggggatatgatggcttagcttgggctcagaggcctgacattcctgtcttcttatactaaagctcggcatccgtgatggtctagggggcttccgaggcgatcgggcagtgtcagtcttcagccgctaagccgagaagaccagatttgaaattggtgagatgcctcacaagataatgccatcagttaaggcaggaacaggcca

SEQ ID NO: 706 - DNA, 480 bp, Homo sapiens
attattgtacaccttgaaggtgaggttaattaagtcctgttgtggggtatgagggccagattctaatttttggagttttatttaatgtcgggagcagattgggtaataaagtgtatattgagaataagatggccttttgaccatttagggtctagggctgtaaagtgtctcagggttgctgccgaacgagccatgaactgttctgggtttttatatttgatgaaaaagagcctaaacgcttctgatttgggataaagaaaaaggagcattaaccttgactatgcctttggctccagccacctttttaagagtaaattgctgagcaagttgggggagggctagtcacggaacataactgcaagcaggaccaggtgtgaggaggggaggcgataaaaagattacagggtggaggagcagaggctgaggaagaattgggacctagcttggcctggtgaggaggggagaggtcagatgggtctg

SEQ ID NO: 707 - DNA, 660 bp, Homo sapiens
ctgcaggcagcaaagatggcccaagagaaatccttcggtgacatttcggaacgactgcagctgagggaacaactgcactgtcacaacttttcctggtacctgcacaatgtctacccagagatgtttgttcctgacctgacgcccaccttctatggtgccatcaagaacctcggcaccaaccaatgcctggatgtgggtgagaacaaccgcggggggaagcccctcatcatgtactcctgccacggccttggcggcaaccagtactttgagtacacaactcagagggaccttcgccacaacatcgcaaagcagctgtgtctacatgtcagcaagggtgctctgggccttgggagctgtcacttcactggcaagaatagccaggtccccaaggacgaggaatgggaattggcccaggatcagctcatcaggaactcaggatctggtacctgcctgacatcccaggacaaaaagccagccatggccccctgcaatcccagtgacccccatcagttgtggctctttgtctaggacccagatcatccccagagagagcccccacaagctcctcaggaaacaggattgctgatgtctgggaacctgatcaccagcttctctggaggccgtaaagatggatttctaaaacccactggggtggcaagg

SEQ ID NO: 708 - DNA, 463 bp, Homo sapiens; identical to SEQ ID NO: 53

SEQ ID NO: 709 - DNA, 890 bp, Homo sapiens
ggcggaccgaagaacgcaggaagggggccggggggacccgcccccggccggccgcagccatgaactccaacgtggagaacctacccccgcacatcatccgcctggtgtacaaggaggtgacgacactgaccgcagacccacccgatggcatcaaggtctttcccaacgaggaggacctcaccgacctccaggtcaccatcgagggccctgaggggaccccatatgctggaggtctgttccgcatgaaactcctgctggggaaggacttccctgcctccccacccaagggctacttcctgaccaagatcttccacccgaacgtgggcgccaatggcgagatctgcgtcaacgtgctcaagagggactggacggctgagctgggcatccgacacgtactgctgaccatcaagtgcctgctgatccaccctaaccccgagtctgcactcaacgaggaggcgggccgcctgctcttggagaactacgaggagtatgcggctcgggcccgtctgctcacagagatccacgggggcgccggcgggcccagcggcagggccgaagccggtcgggccctggccagtggcactgaagcttcctccaccgaccctggggccccagggggcccgggaggggctgagggtcccatggccaagaagcatgctggcgagcgcgataagaagctggcggccaagaaaaagacggacaagaagcgggcgctgcgggcgctgcggcggctgtagtgggctctcttcctccttccaccgtgaccccaacctctcctgtcccctccctccaactctgtctctaagttatttaaattatggctggggtcggggagggtacagggggcactgggacctggatttgtttttctaaataaagttggaaaagca

SEQ ID NO: 710 - DNA, 562 bp, Homo sapiens
ttttttgaattggcatatttgtttatttctcagtttgtgaaaatgtccttaatttgttgatgtagcaaacaaatttcaactttgattgctatgcaaaaaacaagataatctgctttgcaatgaactttatatagttcaactgcatacaggcaacatgctatatatgaaaaagttactaactgaactacaggtattaaatactgaaaagagttaacagtttattataatttattttatttaacaatcagagaagttcgcagccatcagcagttccagtgcaatttcaggtgcaattgggaattcaggaatctcggtggagctgttagtgtagcgaaccttgtacgtaaaatacatgcatactttcgatagcacatgtgaaggtatctctctaaaattgacctcattggtttcgttctcagcaaactgacctgggccactcaacatgggctttatcgtgcctgatgttaatgcatgttctctttttacaataaatttcatggccatcagatgatatcaatttgacatacatggcatcaggtccttcacagtcaccataggtttt

SEQ ID NO: 711 - DNA, 2203 bp, Homo sapiens
cggcggccgcgccctggttgggtccccactgctctcgggggcgccatggacgaggccgtgggcgacctgaagcaggcgcttccctgtgtggccgagtcgccaacggtccacgtggaggtgcatcagcgcggcagcagcactgcaaagaaagaagacataaacctgagtgttagaaagctactcaacagacataatattgtgtttggtgattacacatggactgagtttgatgaaccttttttgaccagaaatgtgcagtctgtgtctattattgacacagaattaaaggttaaagactcacagcccatcgatttgagtgcatgcactgttgcacttcacattttccagctgaatgaagatggccccagcagtgaaaatctggaggaagagacagaaaacataattgcagcaaatcactgggttctacctgcagctgaattccatgggctttgggacagcttggtatacgatgtggaagtcaaatcccatctcctcgattatgtgatgacaactttactgttttcagacaagaacgtcaacagcaacctcatcacctggaaccgggtggtgctgctccacggtcctcctggcactggaaaaacatccctgtgtaaagcgttagcccagaaattgacaattagactttcaagcaggtaccgatatggccaattaattgaaataaacagccacagcctcttttctaagtggttttcggaaagtggcaagctggtaaccaagatgtttcagaagattcaggatttgattgatgataaagacgccctggtgttcgtgctgattgatgaggtggagagtctcacagccgcccgaaatgcctgcagggcgggcaccgagccatcagatgccatccgcgtggtcaatgctgtcttgacccaaattgatcagattaaaaggcattccaatgttgtgattctgaccacttctaacatcaccgagaagatcgacgtggccttcgtggacagggctgacatcaagcagtacattgggccaccctctgcagcagccatcttcaaaatctacctctcttgtttggaagaactgatgaagtgtcagatcatataccctcgccagcagctgctgaccctccgagagctagagatgattggcttcattgaaaacaacgtgtcaaaattgagccttcttttgaatgacatttcaaggaagagcgagggcctcagcggccgggtcctgagaaaactcccctttctggctcatgcgctgtatgtccaggcccccaccgtcaccatagaggggttcctccaggccctgtctctggcagtggacaagcagtttgaagagagaaagaagcttgcagcttacatctgatcctgggcttccccatctggtgcttttcccatggagaacacacaaccagtaagtgaggttgccccacacagccgtctcccagggaatcccttctgcaaaccaaacgttacttagactgcaagctagaaagccaccaaggccaggctttgttaaaagaagtgtattctatttatgttgttttaaaatgcatactgagagacaaacatcttgtcattttcactgtttgtaaaagataattcagattgtttgtctccttgtgaagaaccatcgaaacctgtttgttcccagcccacccccagtggatgggatgcataatgccagcaagttttgtttaacagcaaaaaaggaagattaatgcaggtgttatagaagccagaagagaaactgtgtcaccctaaagaagcatataatcatagcattaaaaatgcacacattactccaggtggaaggtggcaattgctttctgatatcagctcgtttgatttagtgcaaaaatgttttcaagactatttaatggatgtaaaaaagcctatttctacattataccaactgagaaaaaaatggtcggtaaagtgttctttcataataaataatcaagacatggtcccatttgcaggaaaagtgcagactctgagtgttccagggaaacacatgctggacatcccttgtaacccggtatgggcgcccctgcattgctgggatgtttctgcccacggttttgtttgtgcaataacgttatcacatttctaatgaggattcacattaatataatataaaataaataggtcagttactggtctctttctgccgaatgttatgttttgcttttatctcacagtaaaataaatataattaaaaa

SEQ ID NO: 712 - DNA, 1536 bp, Homo sapiens
ggggggggggggaccacttggcctgcctccgtcccgccgcgccacttggcctgcctccgtcccgccgcgccacttcgcctgcctccgtcccccgcccgccgcgccatgcctgtggccggctcggagctgccgcgccggcccttgccccccgccgcacaggagcgggacgccgagccgcgtccgccgcacggggagctgcagtacctggggcagatccaacacatcctccgctgcggcgtcaggaaggacgaccgcacgggcaccggcaccctgtcggtattcggcatgcaggcgcgctacagcctgagagatgaattccctctgctgacaaccaaacgtgtgttctggaagggtgttttggaggagttgctgtggtttatcaagggatccacaaatgctaaagagctgtcttccaagggagtgaaaatctgggatgccaatggatcccgagactttttggacagcctgggattctccaccagagaagaaggggacttgggcccagtttatggcttccagtggaggcattttggggcagaatacagagatatggaatcagattattcaggacagggagttgaccaactgcaaagagtgattgacaccatcaaaaccaaccctgacgacagaagaatcatcatgtgcgcttggaatccaagagatcttcctctgatggcgctgcctccatgccatgccctctgccagttctatgtggtgaacagtgagctgtcctgccagctgtaccagagatcgggagacatgggcctcggtgtgcctttcaacatcgccagctacgccctgctcacgtacatgattgcgcacatcacgggcctgaagccaggtgactttatacacactttgggagatgcacatatttacctgaatcacatcgagccactgaaaattcagcttcagcgagaacccagacctttcccaaagctcaggattcttcgaaaagttgagaaaattgatgacttcaaagctgaagactttcagattgaagggtacaatccgcatccaactattaaaatggaaatggctgtttagggtgctttcaaaggagcttgaaggatattgtcagtctttaggggttgggctggatgccgaggtaaaagttctttttgctctaaaagaaaaaggaactaggtcaaaaatctgtccgtgacctatcagttattaatttttaaggatgttgccactggcaaatgtaactgtgccagttctttccataataaaaggctttgagttaactcactgagggtatctgacaatgctgaggttatgaacaaagtgaggagaatgaaatgtatgtgctcttagcaaaaacatgtatgtgcatttcaatcccacgtacttataaagaaggttggtgaatttcacaagctatttttggaatatttttagaatattttaagaatttcacaagctattccctcaaatctgagggagctgagtaacaccatcgatcatgatgtagagtgtggttatgaactttatagttgttttatatgttgctataataaagaagtgttctgc

SEQ ID NO: 713 - DNA, 1421 bp, Homo sapiens; identical to SEQ ID NO: 47

SEQ ID NO: 714 - DNA, 421 bp, Homo sapiens
  misc_feature (1)..(421): n = a, t, g, or c
tttttttttttttttttcaggcttaaataacaaaatatatttcgatatgcacagttttaactgaggacacacaagccttcctcgggctgcaggcccgccgccctcccagtgggattcacagcccctgcggagtttgtcctcacgcacaccacacacgatcgggtataaaacacattctataaacacgttctgatgcaaactgtgtgtccataaatatatatttatgcaagttcctcccacccactgcagggccgtacagctctggggacaggaggtcacagccgactttaaaccacaggttaagtanaaggttgcaggtcaaatagaagttcccgtgtgattgcatcacccaacggcactgttctgtcatcaggaaatgctgagtgcccgccgtggccgggtgggcgcgggcggtggtcaa

SEQ ID NO: 715 - DNA, 1982 bp, Homo sapiens; identical to SEQ ID NO: 44

SEQ ID NO: 716 - DNA, 1027 bp, Homo sapiens
  misc_feature (1)..(1027): n = a, t, g, or c
ttttttttttttttttttcttgctttctttaaatctttatttaaaagtccatgctaataatgtgtttacatttttacagttacattatgatagaaactgttggattttttaaatatctaaaacaatggcccactgaagaaaggaacaattaactctttaattaattccttaggataaatacccagaaatttaacagctagggcagacttctaatacaataccgaaagtccttccaaaaaccaagtggttgccaacttatgtcccttagcattataacattcttgagccaatagtgtaaaaatacgctgacaattttataggcaaacattactcaaggtatcttactttccacttattactaaagtaattaaccccttaatagaagcttcttaaccaggggacattcttcctgttaaacctatcataagttgaaactatcaagttgaaatgcatttagtaccctgataaacctatcataaagtngaaaatttgtaaattgaaccagtgtaaatcagaggccatcttacttcatactcatgaagcaactatagtgggatatttttcaacttacgagatagcctaggcttgttgaaacactggcctaatttactggctctctggtaattaagtcataaatggtcaaacatcaaattctagaaaagcatatatntaaattctcatcactataattcagaatgactggtttacaaaaatatggtcatagtatttgggtaataactgtggtattgtctcaactggcaagctaaatggaatgccttaaagaatctaatcaaggattagttggcagcaattccagtgttggtaaattcaagggccaacaaggtatgctggagcctgattgcacaaccttgcttaggactttgccttaactacctaccttttagtttgcaaggtaccgaacctccaggtaactcattttctcctagcttggcaattaaagaaatggcatatttggaacctaaagcaatttatgaaaaattcattaactttacactgccactgtata

SEQ ID NO: 717 - DNA, 4086 bp, Homo sapiens
tttttatttttttcgagtgaaggacccggagccgaaacaccggtagagcggggaggtgggtactacacaaccgtctccagccttggtctgagtggactgtcctgcagcgaccatgccccgtaaaggcacccagccctccactgcccggcgcagagaggaagggccgccgccgccgtcccctgacggcgccagcagcgacgcggagcctgagccgccgtccggccgcacggagagcccagccaccgccgcagagactgcaagtgaggaacttgataatagaagtttagaagagattttgaacagcattcctcctcccccgcctccagcaatgaccaatgaagctggagctcctcggcttatgataactcatattgtaaaccagaacttcaaatcctatgctggggagaaaattctgggacctttccataagcgcttttcctgtattatcgggccaaatggcagtggcaaatccaatgttattgattctatgctttttgtgtttggctatcgagcacaaaaaataagatctaaaaaactctcagtattaatacataattctgatgaacacaaggacattcagagttgtacagtagaagttcattttcaaaagataattgataaggaaggggatgattatgaagtcattcctaacagtaatttctatgtatccagaacggcctgcagagataatacttctgtctatcacataagtggaaagaaaaagacatttaaggatgttggaaatcttcttcgaagccatggaattgacttggaccataatagatttttaattttacagggtgaagttgaacaaattgctatgatgaaaccaaaaggccagactgaacacgatgagggtatgcttgaatatttagaagatataattggttgtggacggctaaatgaacctattaaagtcttgtgtcggagagttgaaatattaaatgaacacagaggagagaagttaaacagggtaaagatggtggaaaaggaaaaggatgccttagaaggagagaaaaacatagctatcgaatttcttaccttggaaaatgaaatatttagaaaaaagaatcatgtttgtcaatattatatttatgagttgcagaaacgaattgctgaaatggaaactcaaaaggaaaaaattcatgaagataccaaagaaattaatgagaagagcaatatactatcaaatgaaatgaaagctaagaataaagatgtaaaagatacagaaaagaaactgaataaaattacaaaatttattgaggagaataaagaaaaatttacacagctagatttggaagatgttcaagttagagaaaagttaaaacatgccacgagtaaagccaaaaaactggagaaacaacttcaaaaagataaagaaaaggttgaagaatttaaaagtatacctgccaagagtaacaatatcattaatgaaacaacaaccagaaacaatgccctcgagaaggaaaaagagaaagaagaaaaaaaattaaaggaagttatggatagccttaaacaggaaacacaagggcttcagaaagaaaaagaaagtcgagagaaagaacttatgggtttcagcaaatcggtaaatgaagcacgttcaaagatggatgtagcccagtcagaacttgatatctatctcagtcgtcataatactgcagtgtctcaattaactaaggctaaggaagctctaattgcagcttctgagactctcaaagaaaggaaagctgcaatcagagatatagaaggaaaactccctcaaactgaacaagaattaaaggagaaagaaaaagaacttcaaaaacttacacaagaagaaacaaactttaaaagtttggttcatgatctctttcaaaaagttgaagaagcaaagagctcattagcaatgaatcgaagtagggggaaagtccttgatgcaataattcaagaaaaaaaatctggcaggattccaggaatatatggaagattgggggacttaggagccattgatgaaaaatacgacgtggctatatcatcctgttgtcatgcactggactacattgttgttgattctattgatatagcccaagaatgtgtaaacttccttaaaagacaaaatattggagttgcaacctttataggtttagataagatggctgtatgggcgaaaaagatgaccgaaattcaaactcctgaaaatactcctcgtttatttgatttagtaaaagtaaaagatgagaaaattcgccaagctttttattttgctttacgagataccttagtagctgacaacttggatcaagccacaagagtagcatatcaaaaagatagaagatggagagtggtaactttacagggacaaatcatagaacagtcaggtacaatgactggtggtggaagcaaagtaatgaaaggaagaatgggttcctcacttgttattgaaatctctgaagaagaggtaaacaaaatggaatcacagttgcaaaacgactctaaaaaagcaatgcaaatccaagaacagaaagtacaacttgaagaaagagtagttaagttacggcatagtgaacgagaaatgaggaacacactagaaaaatttactgcaagcatccagcgtttaatagagcaagaagaatatttgaatgtccaagttaaggaacttgaagctaatgtacttgctacagcccctgacaaaaaaaagcagaaattgctagaagaaaacgttagtgctttcaaaacagaatatgatgctgtggctgagaaagctggtaaagtagaagctgaggttaaacgcttacacaataccatcgtagaaatcaataatcataaactcaaggcccaacaagacaaacttgataaaataaataagcaattagatgaatgtgcttctgctattactaaagcccaagtagcaatcaagactgctgacagaaaccttcaaaaggcacaagactctgtcttgcgtacagagaaagaaataaaagatactgagaaagaggtggatgacctaacagcagagctgaaaagtcttgaggacaaagcagcagaggtcgtaaagaatacaaatgctgcagaggaatccttaccagagatccagaaagaacatcgcaatctgcttcaagaattaaaagttattcaagaaaatgaacatgctcttcaaaaagatgcacttagtattaagttgaaacttgaacaaatagatggtcacattgctgaacataattctaaaataaaatattggcacaaagagatttcaaaaatatcactgcatcctatagaagataatcctattgaagagatttcggttctaagcccagaggatcttgaagcgatcaagaatccagattctataacaaatcaaattgcacttttggaagcccggtgtcatgaaatgaaaccaaacctcggtgccatcgcagagtataaaaagaaggaagaattgtatttgcaacgggtagcagaattggacaaaattacttatgaaagagacagttttagacaggcatatgaagatcttcggaaacaaaggcttaatgaatttatggcaggtttttatataataacaaataaattaaaggaaaattaccaaatgcttactttgggaggggacgccgaactcgagcttgtagacagcttggatcctttctctgaaggaatcatgttcagtgttcgaccacctaagaaaagttggaaaaagatcttcaacctttcgggaggagagaaaacacttagttcattggctttagtatttgctcttcaccactacaagcccactcccctttacttcatggatgagattgatgcagcccttgattttaaaaatgtgtccattgttgcattttatatatatgaacaaacaaaaaatgcacagttcataataatttctcttcgaaataatatgtttgagatttcggatagacttattggaatttacaagacatacaacataacaaaaagtgttgctgtaaatccaaaagaaattgcatctaagggactttgttgaactttatgctgaagattcttcaagttgattcagtgtattactgatttttttctatttgtaaaggattatgagttgtataaaatacatactccctaaactagatcatg

SEQ ID NO: 718 - DNA, 1055 bp, Homo sapiens; identical to SEQ ID NO: 666

SEQ ID NO: 719 - DNA, 511 bp, Homo sapiens
  misc_feature (1)..(511): n = a, t, g, or c
aaaacactcaacttcaagatgggtaacagacacaaattcacagggaagaaagtgactgangagcttctgaccgataatagatacttgcttctggttctgatggatgctgaaagagcctggngctacgccatgcagctgaaacaggaagccaacactgaacccngaaaacggtttcacttgttatctcgcctacgcaaagccgtgaagcatgcagaggaattggaacgcttgtntgagagcaatcgcgtggatgccaagaccaaattagaggctcaggcttacacagcttacctctcaggaatgctacgttttgaacatcaagaatngaaagctgccatntgaggcttttaacaaatgcaaaactatctatgagaagctagccagtgctttcacagaggngcaggctgtgctgtataaccaacgtgtggangagatttcacccaacatccgctattgtgcatataatattggggaccagtcagccatcaatgaactcatgcagattgagatt

SEQ ID NO: 720 - DNA, 2253 bp, Homo sapiens; identical to SEQ ID NO: 61

SEQ ID NO: 721 - DNA, 692 bp, Homo sapiens
ttccccgagccgcagtcttggaccataatcatggtggacatgatggacttgcccaggtcgcgcatcaacgccggcatgctagctcaattcatcgacaagcctgtctgcttcgtagggaggctggaaaagattcatcccaccggaaaaatgtttattctttcagatggagaaggaaaaaatggaaccatcgagttgatggaaccccttgatgaagaaatctctggaattgtggaagtggttggaagagtaaccgccaaggccaccatcttgtgtacatcttatgtccagtttaaagaagatagccatccttttgatcttggactttacaatgaagctgtgaaaattatccatgacttccctcagttttatcctttagggattgtgcaacatgattgatcttgatggattttcatacgattgtaaatgagctatattaaagtctattaaaggaagcccttcttgtttgagggagagatttctgtgctttctcatatttaatttgctgtttttaagatattccaacctagagtttttgatggaactgatatattgacagttctcaccgaagcccttttataaagaattgctactccaatatatggtcagattagatgcaagaataaagcagttgtccgagtctaagtttctattttattaataaaaactaaaatggtacgtacaaaaaaaaaacc

SEQ ID NO: 722 - DNA, 1771 bp, Homo sapiens; identical to SEQ ID NO: 24

SEQ ID NO: 723 - DNA, 823 bp, Homo sapiens
  misc_feature (1)..(823): n = a, t, g, or c
cgtgactaagatggaagcgtttttggggtcgcggtccggactttgggcggggggtccggccccaggacagttttaccgcattccgtccactcccgattccttcatggatccggcgtctgcactttacagaggtccaatcacgcggacccagaaccccatggtgaccgggacctcagtcctcggcgttaagttcgagggcggagtggtgattgccgcagacatgctgggatcctacggctccttggctcgtttccgcaacatctctcgcattatgcgagtcaacaacagtaccatgctgggtgcctctggcgactacgctgatttccagtatttgaagcaagttctcggccagatggtgattgatgaagacctcctgggagatggacacagctatagtcctagagctattcattcatggctgaccagggccatgtacagccggcgctcgaagatgaaccctttgtggaacaccatggtcatcggaggctatgctgatggagagagcttcctcggttatgtggacatgcttggtgtagcctatgaagccccttcgctggccactggttatggtgcatacttggctcagctctgctgcgagaagttctggagaagcagccagtgctaagccagaccgaggcccgcgacttagtagaacgctgcatgcgagtgctgtactaccgagatgcccgttcttacaaccggtttcaaatcgccactgtcaccganaaaggtgttgaaatagagggacattgtctacagagaccaactggatattgccacatgatcagtngctttgatgaatacagatgcattatcaaactga

SEQ ID NO: 724 - DNA, 433 bp, Homo sapiens
  misc_feature (1)..(433): n = a, t, g, or c
ggggaccgcctttccatggcttttgcaggctaggcttggcttatgctggctcaaatcgtgaagatgtcctaacactgctgctgcctgtgatgggagattcaaagtccagcatggaggtgagtagaggctattgagcatttagagtaagtagggaaggtgctttgagtcttactttctgtgataaataatgaaaaagaagtaagtgtgtgcatgtgtgcatacatgtacatgcctgttggtgtgtattgaggggcgtcacctcagtgaaaccccttgatctgggattctaagcctctggtggttttaaggctaaagagttaacattttaggcctggcacggtggctcgtgctataatcccagcactttgggaggctgcagtgggcggatcacttgagcccaggagttcgagaccaacctgggcaagantgtgaa

SEQ ID NO: 725 - DNA, 484 bp, Homo sapiens
tttttttccagttctttcttttttattctgcagttttctatcagtgtcgggtcccccactccagccagtggctgtggggaagggaagacatctctagggacacgactacagaccaggcagtgagcctagcaaccatacatcgaaggtgtcgccagcctcagtgccggtgggcgtctgcaccaggaatagctaaagccgacgacatctagccacctcgagcgccagggaagacgctccgcgtaaaaccgcggcctcaggcggactcccgctccagctccgcgctgctggtggcatttccggggacccaaagtgggtggcctgggggcaaaggaacagaggccgaagaacttggggtatgttccactagagcacctaagggacggagtgggaggttacatcagatatgcgacctcgacacattccaaaagtggcagccccgtgggctacccccaatagtgggatggatctccccaacttctctcgc

SEQ ID NO: 726 - DNA, 607 bp, Homo sapiens; identical to SEQ ID NO: 210

SEQ ID NO: 727 - DNA, 1807 bp, Homo sapiens
ctttccgtccccttgcttcgtcttcgcttttctttctacttattcttatctgtgtctttcgctttgtttgcctctccgtctgttttccctcagggcccccttctttcctcgaccttttcaaatcgcaaatatggcgccggagcggctgcggagccgggcgccctccgccttcaagttgcggggcttgctgctccgtggtgaagctattaagtacctcacagaagctcttcagtctatcagtgaattagagcttgaagataaactggaaaagataattaatgcagttgagaagcaacccttgtcatcaaacatgattgaacgatctgtggtggaagcagcagtccaggaatgcagtcagtctgttgatgaaactatagagcacgttttcaatatcataggagcatttgatattccacgctttgtgtacaattcagaaagaaaaaaatttcttcctctgttaatgaccaaccaccctgcaccaaatttatttggaacaccaagagataaagcagagatgtttcgtgagcgatataccattttgcaccagaggacccacaggcatgaattatttactcctccggtgataggttctcaccctgatgaaagcggaagcaaattccagcttaaaacaatagaaaccttattgggtagtacaaccaaaatcggagatgcgattgttcttggaatgataacgcagttaaaagagggaaaattttttctggaagatcctactggaacagtccaactagaccttagtaaagctcagttccatagtggtttatacacagaggcatgctttgtcttagcagaaggttggtttgaagatcaagtgtttcatgtcaatgcctttggatttccacccactgagccctctagtactactagggcatactatggaaatattaatttttttggaggtccttctaatacatctgtgaagacttctgcaaaactaaaacagctagaagaggagaataaagatgctatgtttgtgtttttatctgatgtttggttggaccaggtggaagtattggaaaaacttcgcataatgtttgctggttattcaccagcacctccaacctgctttattctgtgtggtaatttttcatctgcaccatatggaaaaaatcaagttcaagctttgaaagattccctaaaaactttggcagatataatatgtgaatacccagatattcaccaaagtcgttttgtgtttgtacctggtccagaggatcctggatttggttccatcttaccaaggccaccacttgctgaaagcatcactaatgaattcagacaaagggtaccattttcagtttttactactaatccttgcagaattcagtactgtacacaggaaattactgtcttccgtgaagacttagtaaataaaatgtgcagaaactgcgtccgttttcctagcagcaatttggctattcctaatcactttgtaaagactatcttatcccaaggacatctgactcccctacctctttatgtctgcccagtgtattgggcatatgactatgctttgagagtgtatcctgtgcccgatctacttgtcattgcagacaaatatgatcctttcactacgacaaataccgaatgcctctgcataaaccctggctcttttccaagaagtggattttcattcaaagttttttatccttctaataagacagtagaagatagcaaacttcaaggcttttgagattcttaaagatcatctgaagaaaattcatcagttttctgcttaactctatatcttatgtgattctgatattacaataaaattatggtaaacttt

SEQ ID NO: 728 - DNA, 1475 bp, Homo sapiens
tccacctgtccccgcagcgccggctcgcgccctcctgccgcagccaccgagccgccgtctagcgccccgacctcgccaccatgagagccctgctggcgcgcctgcttctctgcgtcctggtcgtgagcgactccaaaggcagcaatgaacttcatcaagttccatcgaactgtgactgtctaaatggaggaacatgtgtgtccaacaagtacttctccaacattcactggtgcaactgcccaaagaaattcggagggcagcactgtgaaatagataagtcaaaaacctgctatgaggggaatggtcacttttaccgaggaaaggccagcactgacaccatgggccggccctgcctgccctggaactctgccactgtccttcagcaaacgtaccatgcccacagatctgatgctcttcagctgggcctggggaaacataattactgcaggaacccagacaaccggaggcgaccctggtgctatgtgcaggtgggcctaaagccgcttgtccaagagtgcatggtgcatgactgcgcagatggaaaaaagccctcctctcctccagaagaattaaaatttcagtgtggccaaaagactctgaggccccgctttaagattattgggggagaattcaccaccatcgagaaccagccctggtttgcggccatctacaggaggcaccgggggggctctgtcacctacgtgtgtggaggcagcctcatcagcccttgctgggtgatcagcgccacacactgcttcattgattacccaaagaaggaggactacatcgtctacctgggtcgctcaaggcttaactccaacacgcaaggggagatgaagtttgaggtggaaaacctcatcctacacaaggactacagcgctgacacgcttgctcaccacaacgacattgccttgctgaagatccgttccaaggagggcaggtgtgcgcagccatcccggactatacagaccatctgcctgccctcgatgtataacgatccccagtttggcacaagctgtgagatcactggctttggaaaagagaattctaccgactatctctatccggagcagctgaagatgactgttgtgaagctgatttcccaccgggagtgtcagcagccccactactacggctctgaagtcaccaccaaaatgctgtgtgctgctgacccacagtggaaaacagattcctgccagggagactcagggggacccctcgtctgttccctccaaggccgcatgactttgactggaattgtgagctggggccgtggatgtgccctgaaggacaagccaggcgtctacacgagagtctcacacttcttaccctggatccgcagtcacaccaaggaagagaatggcctggccctctgagggtccccagggaggaaacgggcaccacccgctttcttgctggttgtcatttttgcagtagagtcatctccatcagctgtaagaagagactgggaagat

SEQ ID NO: 729 - DNA, 828 bp, Homo sapiens; identical to SEQ ID NO: 91
  misc_feature (1)..(828): n = a, t, g, or c

SEQ ID NO: 730 - DNA, 1032 bp, Homo sapiens
  misc_feature (1)..(1032): n = a, t, g, or c
ntttattgtaaagcatgcaatattacaaatagagagaaatatagagtgaagagaatacagcaataaagttagvcggaggggtaggggcaatggggttcagtggtagvargagggctactgacaggggtaaaagcaagggtttttatttatcacttttataacttccatgaaaatttaccatccatcattgacaagttcattctagcagtaatttatcagaggtcactcatcctctattaaattattaatctaatcacctttgaactttctcccactggggtttttatccatgtccaattcgctctaaataagttggtctccctgcagttccctccgagtttatttgamatctttaaggatagcaattatagggtaaagggttacaagtaagtacgcatgtccacttatagcgatatctaatacataatattattctaacattctaaatrgccccacccacttaaaattacttaatagtccctcccaccctaaaatgcttatgattatatatcccctattacttaaacttgattacacaaagaaataaaagcaatgcaattttccacagaccaattcaataccattctacaatctaaaacaacaaagaactttcagtctcatcagatgtgcattctctctttagatgaaaatgtagcatggttcccgcagctctccatttctgcccaggtctttccagcaggttgttctctgttgtcaatcttggaactgtctgtatctgatgtgagatgtctgtggtggatgacaactggatcaattcagaagtccaagaggtacctacaaacttaaacagaattccagactgcaccatatagatgtggccctcttattttgtgcacctgcaagttcactgtattacttcacgatttgatcagactaaattctccttttttccactaagacaaatacctcactgtccaaactaaaattgacccttcataaatgtatgtaaactttctgtgtttcaatatcctagcatgataaatttagctagttctctctaggcttgcctat

SEQ ID NO: 731 - DNA, 809 bp, Homo sapiens; identical to SEQ ID NO: 473

SEQ ID NO: 732 - DNA, 559 bp, Homo sapiens
  misc_feature (1)..(559): n = a, t, g, or c
atgcattcaaatatttattgagcagctaaggagatacaaaggcgatttaaaacattgtcaggtgaggcaaatgcacaagtaatagaaagcaaagggcaaggttcactgaatcacagcagtcagaagaaagtgctttagggaaccaagagattgtttccagcctgaagaggcatgggtggcaaatcagaaaaggggattgagattaaaatagaagacttcagtctggattgttgatgacactcagtatggactatatttgtctctccttttcctttctccccatctttgggcttaatttacatgtagtgcccaggactgttcaatgcgctttttctatacttgcttgcatttttgcttaatgtctctacagaactaggtcctttggtgttttaggagttttttccngtttctgaaggattctgtcntttgatctggtgttgaaganggtttgagtctttccattcngaattgactttgtgcattttggccgagaacncgaaagattctcacngcgcttttctcncttctcancatcaaatctcctcncacacttcncaca

SEQ ID NO: 733 - DNA, 573 bp, Homo sapiens
gagagccagaacggaagtcttggttttatttatagttgataacttacatccggcctgctcctcaggaagcacagcagggaggagacagagcccaaaggagacggcgacaaaaatgcccaaacccctgagctaatgtggtgactgagagcaagcctaaagctcccttctgagctccccagcagccaaagcaaagagagaaacagggtcctgcagcatgatgtcacagaaaaccagggaccctggagcctgggttccaataagaaccttacattctgacgccttagatttctccctggaaaatggggagaaaaatactgaattggttgggagggccatgcaacacacccagcacagtgtctggatgcatttcagaggccccaccagtctagggtctacagaaagacagtacaggcgcctcactctccatgcctgtacgcatggcagacatcactcatggattgcaacacgcttccctggagccagatgcagcctcgtagccccattgcacaatgtctccaggggctaccaccaatgccccagtcggctggagctgaacttgcgtgtcctcccagc

SEQ ID NO: 734 - DNA, 407 bp, Homo sapiens
  misc_feature (1)..(407): n = a, t, g, or c
aactcttctttggttttgattaattctcctttggttttagctaattcagctttaatttgattaaactttagttctaaacaagcagtagcttcttcagtttcaacttttgtggcacaaatgtctttcgctgcttcttctcgagtgtcacatttaccaaccaaatccttgaagatagccaaacgacgttcagcattttcttctaatatctctcgttcttgaagcagagtctccttaaagtcagcttcccgttgagcccaatactgagtaaactcctgtgtaacttcttctcgaattttaaattccaaggttaatttttccnttttttcanttatcagnttttttttcaagtcntctattaagtccaacagttttcctttctcctcgtgggctaatgaaagccttaattt

SEQ ID NO: 735 - DNA, 3112 bp, Homo sapiens
gtggaacctcgatattggtggtgtccatcgtgggcagcggactaataaaggccatggcgccagcagaaatcctgaacgggaaggagatctccgcgcaaataagggcgagactgaaaaatcaagtcactcagttgaaggagcaagtacctggtttcacaccacgcctggcaatattacaggttggcaacagagatgattccaatctttatataaatgtgaagctgaaggctgctgaagagattgggatcaaagccactcacattaagttaccaagaacaaccacagaatctgaggtgatgaagtacattacatctttgaatgaagactctactgtacatgggttcttagtgcagctacctttagattcagagaattccattaacactgaagaagtgatcaatgctattgcacccgagaaggatgtggatggattgactagcatcaatgctgggagacttgctagaggtgacctcaatgactgtttcattccttgtacgcctaagggatgcttggaactcatcaaagagacaggggtgccgattgccggaaggcatgctgtggtggttgggcgcagtaaaatagttggggccccgatgcatgacttgcttctgtggaacaatgccacagtgaccacctgccactccaagactgcccatctggatgaggaggtaaataaaggtgacatcctggtggttgcaactggtcagcctgaaatggttaaaggggagtggatcaaacctggggcaatagtcatcgactgtggaatcaattatgtcccagatgataaaaaaccaaatgggagaaaagttgtgggtgatgtggcatacgacgaggccaaagagagggcgagcttcatcactcctgttcctggcggcgtagggcccatgacagttgcaatgctcatgcagagcacagtagagagtgccaagcgtttcctggagaaatttaagccaggaaagtggatgattcagtataacaaccttaacctcaagacacctgttccaagtgacattgatatatcacgatcttgtaaaccgaagcccattggtaagctggctcgagaaattggtctgctgtctgaagaggtagaattatatggtgaaacaaaggccaaagttctgctgtcagcactagaacgcctgaagcaccggcctgatgggaaatacgtggtggtgactggaataactccaacacccctgggagaagggaaaagcacaactacaatcgggctagtgcaagcccttggtgcccatctctaccagaatgtctttgcgtgtgtgcgacagccttctcagggccccacctttggaataaaaggtggcgctgcaggaggcggctactcccaggtcattcctatggaagagtttaatctccacctcacaggtgacatccatgccatcactgcagctaataacctcgttgctgcggccattgatgctcggatatttcatgaactgacccagacagacaaggctctctttaatcgtttggtgccatcagtaaatggagtgagaaggttctctgacatccaaatccgaaggttaaagagactaggcattgaaaagactgaccctaccacactgacagatgaagagataaacagatttgcaagattggacattgatccagaaaccataacttggcaaagagtgttggataccaatgatagattcctgaggaagatcacgattggacaggctccaacggagaagggtcacacacggacggcccagtttgatatctctgtggccagtgaaattatggctgtcctggctctcaccacttctctagaagacatgagagagagactgggcaaaatggtggtggcatccagtaagaaaggagagcccgtcagtgccgaagatctgggggtgagtggtgcactgacagtgcttatgaaggacgcaatcaagcccaatctcatgcagacactggagggcactccagtgtttgtccatgctggcccgtttgccaacatcgcacatggcaattcctccatcattgcagaccggatcgcactcaagcttgttggcccagaagggtttgtagtgacggaagcaggatttggagcagacattggaatggaaaagttttttaacatcaaatgccggtattccggcctctgcccccacgtggtggtgcttgttgccactgtcagggctctcaagatgcacgggggcggccccacggtcactgctggactgcctcttcccaaggcttacatacaggagaacctggagctggttgaaaaaggcttcagtaacttgaagaaacaaattgaaaatgccagaatgtttggaattccagtagtagtggccgtgaatgcattcaagacggatacagagtctgagctggacctcatcagccgcctttccagagaacatggggcttttgatgccgtgaagtgcactcactgggcagaagggggcaagggtgccttagccctggctcaggccgtccagagagcagcacaagcacccagcagcttccagctcctttatgacctcaagctcccagttgaggataaaatcaggatcattgcacagaagatctatggagcagatgacattgaattacttcccgaagctcaacacaaagctgaagtctacacgaagcagggctttgggaatctccccatctgcatggctaaaacacacttgtctttgtctcacaacccagagcaaaaaggtgtccctacaggcttcattctgcccattcgcgacatccgcgccagcgttggggctggttttctgtaccccttagtaggaacgatgagcacaatgcctggactccccacccggccctgtttttatgatattgatttggaccctgaaacagaacaggtgaatggattattctaaacagatcaccatccatcttcaagaagctactttgaaagtctggccagtgtctattcaggcccactgggagttaggaagtataagtaagccaagagaagtcagcccctgcccagaagatctgaaactaatagtaggagtttccccagaagtcattttcagccttaattctcatcatgtataaattaacataaatcatgcatgtctgtttactttagtgacgttccacagaataaaaggaaacaagtttgcca

SEQ ID NO: 736 - DNA, 596 bp, Homo sapiens
  misc_feature (1)..(596): n = a, t, g, or c
gaaaaattttgttaggccacaaaaacactgcactgtgaacattttagaaaaggtatgtcagactgggattaatgacagcatgattttcaatgactgtaaattgcgataaggaaatgtactgattgccaatacaccccaccctcattacatcatcaggacttgaagccaagggttaacccagcaagctacaaagagggtgtgtcacactgaaactcaatagttgagtttggctgttgttgcaggaaaatgattataactaaaagctctctgatagtgcagagacttaccagaagacacaaggaattgtactgaagagctattacaatccaaatattgccgtttcataaatgtaataagtaatactaattcaccagagtattgtaaaatggtggatgaccaaagaaaaatctgctctggtggaaagaaagaactgtctctaccaggggtccagagcntgaacgcatcaatagaagaactccgggggaacatcccatccacaggnctacacacttgtatataccatcctgagacactgcaatgtgnaaatcncgtttgcnatttataaccttgtccctagattaatgtgnccggncaga

SEQ ID NO: 737 - DNA, 2124 bp, Homo sapiens; identical to SEQ ID NO: 321

SEQ ID NO: 738 - DNA, 1484 bp, Homo sapiens; identical to SEQ ID NO: 670

SEQ ID NO: 739 - DNA, 236 bp, Homo sapiens
cccttcactgtacatctaattcttttgacccacttcaattttcatcatagtaggtagagccacatcttgagaaaccttaaaactatagatttactacaaaaaagatgagctaatacaaagtctaaagtaaactaaaagaggggttgatttacatctggcacaacttagtctttgttccaatcattttagaagtctcaatttaactccaggctagactccagtttgttctgggcctc

SEQ ID NO: 740 - DNA, 620 bp, Homo sapiens
ataacagctattaatactactataacataggcataaatattttcgtgtttatatgcatatacaagttaaaataattagaaactatgactgcgcctagtaaagtcatctaggtttatagttcagtagcttaggcaaggcacacactgctcatctccgctttttagggtcagaggaacacaagctcgtgttctgagtgaagggcgtacactggcacctggtgttgcctagatcccccatctcctccttccagccaggtctggaagtttcaacagcccaagcttaacttcatgtaaagtcttcactgccagtgggaacatctttgacacaacaagacactccaattgtgatttgagttgaggatctctgcctgccttcctgccgtccttccttcttccccgatccatgctacttttaggggctgcggagagcagcagcagagctgagtaatgatacagggcaccacggagagaaagtagaaccatttcactcctgggaagatggggtatttcccacttccagcaacgaaataacaaatgaaaagttgcatacttattgatgtattgtatgagccagtagcattttatgtacaaaacagaagtcaatgcaacagtatgtatgtg

SEQ ID NO: 741 - DNA, 1637 bp, Homo sapiens
ccgtgtcggtcaacgagagcctcctcacgcccctcaacctggagatcgaccccaacgcgcagtgcgtgaagcaggaggagaaggagcagatcaagtccctcaacagcaggttcgcggccttcatcgacaaggtgcgcttcctggagcagcagaacaaactgctggagacaaagctgcagttctaccagaaccgcgagtgttgccagagcaacctggagcccctgtttgagggctacatcgagactctgcggcgggaggccgagtgcgtggaggccgacagcgggaggctggcctcagagcttaaccacgtgcaggaggtgctggagggctacaagaagaagtatgaggaggaggtttctctgagagcaacagctgagaacgagtttgtggctctgaagaaggatgtggactgcgcctacctccgcaagtcagacctggaggccaacgtggaggccctgatccaggagatcgacttcctgaggcggctgtatgaggaggagatccgcattctccagtcgcacatctcagacacctccgtggttgtcaagctggacaacagccgggacctgaacatggactgcatcattgccgagattaaggcacagtatgacgacattgtcacccgcagccgggccgaggccgagtcctggtaccgcagcaagtgtgaggagatgaaggccacggtgatcaggcacggggagaccctgcgccgcaccaaggaggagatcaatgagctgaaccgcatgatccaaaggctgacggccgaggtggagaatgccaagtgccagaactccaagctggaggccgcggtggctcagtctgagcagcagggtgaggcagccctcagtgatgcccgctgcaagctggccgagctggagggcgccctgcagaaggccaagcaggacatggcctgcctgatcagggagtaccaggaggtgatgaactccaagctgggcctggacatcgagatcgccacctacaggcgcctgctggagggcgaggagcagaggctatgtgaaggcattggggctgtgaatgtctgtgtcagcagctcccggggcggggtcgtgtgcggggacctctgcgtgtcaggctcccggccagtgactggcagtgtctgcagcgctccgtgcaacgggaacgtggcggtgagcaccggcctgtgtgcgccctgcggccaattgaacaccacctgcggagggggttcctgcggcgtgggctcctgtggtatcagctccctgggtgtggggtcttgcggcagcagctgccggaaatgttaggcaccccaactcaagtcccaggccccaggcatctttgcctgccctgccttgcttggcccagtcagtcaggcgcctggagaagtgctcagctacttctcctgcactttgaaagacccctcccactcctggcctcacatttctctgtgtgatcccccacttctgggctctgccaccccacagtgggaaaggccaccctagaaagaagtccgctggcacccataggaaggggcctcaggagcaggaagggccaggaccagaaccttgcccacggcaactgccttcctgcctctccccttcctcctctgctcttgatctgtgtttcaataaattaatgtagccaaaaaaaaaaaaaaaaaa

SEQ ID NO: 742 - DNA, 1976 bp, Homo sapiens; identical to SEQ ID NO: 50

SEQ ID NO: 743 - DNA, 650 bp, Homo sapiens
  misc_feature (1)..(650): n = a, t, g, or c
gcggccgcaccaacaagctggtcaccttgcctgtcagctttgctcagctcaagaacctgaagtggttggacctgaaggataaccccctggatcctgtcctggccaaggtggcaggtgactgcttggatgagaagcagtgtaagcagtgtgcaaacaaggtgttacagcacatgaaggccgtgcaggcagatcaggagcgggagaggcagcggcggctggaagtagaacgtgaggcagagaagaagcgtgaggctaagcagcgagctaaggaagctcaggagcgggaactgcggaagcgggagaaggcggaagagaaggagcgccggagaaaggagtatgatgccctcaaagcagccaagcgggagcaggagaagaaacctaagaaggaagcaaatcaggccccgaaatctaagtctggctcccgtccccgcaagccaccaccccggaagcacactcgttcctgggctgtgctgaagctgctgctgctgctgctgctatntggtgtggcgggagggctggttgcttgtcgggtgacagagctgcagcagcagcccctctgcaccagcgtgaacaccatctatgacaatgcggtccagggtctacgccgncatgagatcctncagtgggtcctncagaccgactctcagcag

SEQ ID NO: 744 - DNA, 512 bp, Homo sapiens
tttaaaactaaaattggttttaataaaagttttggagtcatctaaatgagtaactatacacattcctcctctccagcaagtatacagaaatcttcccttactccaatttgacgctgcaaaatcatacatgcaccccaaactgatctgttattgaaatttctttttctggtctcacccattactttaacatatcagaggaattaacataacagcctagagaacagaaataagagataataggtgcttcagtaccacccaaattatctactaagaccacagtgtggcaacagaatgcagattcatggtagtagttccttgaatgaaagagttcagacagaatcttccacaaacacaaatttttgcggtatccaaatcttggcagagatggaatggaatgatatgagagccatatggaatccttacttagacagatatccacaggaggctcctttaaccgaacagtggctttcccctcatctacaaatttggtgaagaattgctcaatgttctcc

SEQ ID NO: 745 - DNA, 504 bp, Homo sapiens
  misc_feature (1)..(504): n = a, t, g, or c
aatttcttaataactcctacaacattcccccctgtggagatgccacactaactgctgttagggagttttgggcgacgactccttctggctacttcttgttgcaaaagggcgtcgaatggggaagagcagctagggctcctcctggggtcaatctaagggtcctcagaagaatgatgtgtctatgtgtggttctgtttacagcaccatttggagtttgattgcttctagatgagaagaaacaatttgagttatagtattgtgtatacagggtccaaatatcaatacaagacacataagcaagagagggcttaataaaggggttaaccaattccataaaggaagactgggatttatttaaaggggccttgtaggccactcggggatccatnattttggntttgnttttaagtacttgttggntttcntttaaccagggggctttattccgaaggcggctgtttcctttgaaaactgcttcacttaaccccattanaagtnctagtt

SEQ ID NO: 746 - DNA, 420 bp, Homo sapiens
  misc_feature (1)..(420): n = a, t, g, or c
ttttttttttttttttttcttttttaaaaaatttttattttagactgggggggtacatgtgcgtntttgccacatggtacactntntaaccgtaggcgatttgccttctagggcagtggtccccagcctttttggcaccagggactggttttttggaagacaatttttccatagactggggtaacgggaatggtttagggataaaactnttccacccccgatcatcaggcattagattntcatgaggagcgcgcacctnggatcccttgcgcgcgtgcgtgccttnggagaatctaatgcagtgctgatctgacatgaggtgcagctcaggcaggantgccgcccaccgntcacttcctgctgcgtggcccggttccaataggccaggtaccggtccgnagcctggcgnttggggaccct

SEQ ID NO: 747 - DNA, 786 bp, Homo sapiens
ggcacgagggtcttcctcaccctgctctcggtcgtgatcttgatcttcttttacctgtacaagaacaaaggcagctacgtcacctatgaacctacagaaggtgagcccagtgccatcgtccagatggagagtgacttggccaagggcagcgagaaagaggaatatttcatctaatgactcccaggccccaaggagcttattcctggctccatcgctaacacgttgactgcttattatgggaaagttttctctgaagccagggagaagcattgattgatgtgggcaaatccaagctccagccaggtcgcagtcccaaatgccgacatcactgactccagggaccagggacatggagaaagctgtttatgatatctttaaccaggccctcttactagagctggtgtttgtgactggccaacaagatgtggctatgccaggggacatctgagtatgtgcccagtcatcttttttcacaggttgaagggagagaaaagattttgagttaaggtcattggctgctctactctgtcccctacctggtcacctagtgatagccccagtggagatactgtccatacaaggtcttcccagaggctggataccacagtaaaaggccaggccaggaggggtaggagactatggagatcttacctcctgataaatgtgctacaccccctaatctgagcccttcctttccgtgttccccaacaacctcatgcttacgtgatttttattcaaattaaaaattttcattgctacagaaaaaaaaaaaaaaaaaaaaaaaaa

SEQ ID NO: 748 - DNA, 496 bp, Homo sapiens
ttttttttttttttttggcgagactccaagactattatttgtatttccggacaaaaacatctgcttcacacagtgcacggcatcaaatgaagaggaaagaacttgtatcccaaagcctggctttctgtatcatccacaaattaagacagcatctgctgagcccatgctgagcctgtcacagtcaacaactgggaaaccggggcctctactgaaccaggggacaagtagccgaagcacttaaacagcttgatacttgttttttgggacatttgtttatttaaagcacaggaaatgaataaaatgccacctaaaaagtatctgcaatgaataaattatttccagtgaagcactgcagatccacacacaccagtctgctaacctttaccaaggacatgtccggtgggcttgtgcttgtcccagttgactcttccttgagacctttcccttctgtgcaatgaccacagcattagagaccagtcctgcatgcgctggcctt

SEQ ID NO: 749 - DNA, 1404 bp, Homo sapiens; identical to SEQ ID NO: 626

SEQ ID NO: 750 - DNA, 482 bp, Homo sapiens
  misc_feature (1)..(482): n = a, t, g, or c
ttttgcaaaagattagaaccattaaaatatttaattcttcaactttaaaaaattaaataaaatcaaaataggataatgaccagaatagtgccattataatcacatcaaaaagcttccattaacattttatgaatttggcaatctagtacaatacattaagtattgtgtttcactcaattttgtgatactccatttttgaaaaaacttagaggcttcagatacccatgaaaagaaaaaaatcagggtagaaacacataggctgaggtttgctaattcactgtttacagaggaccttagatgtcccactataattgctcttaggtatttttaacaaatgaatagtcataattcacagaaaagacaagtggtactttttatctacatagactatactatataaactttcagtaaaacatttaaattgttttacttttaatcttgtcaagtaattntcatttcttctacttcaaaaggttgaccag

SEQ ID NO: 751 - DNA, 553 bp, Homo sapiens; identical to SEQ ID NO: 15
  misc_feature (1)..(553): n = a, t, g, or c

SEQ ID NO: 752 - DNA, 653 bp, Homo sapiens; identical to SEQ ID NO: 465
  misc_feature (1)..(653): n = a, t, g, or c

SEQ ID NO: 753 - DNA, 421 bp, Homo sapiens
cattttaaaataaacatttaattcaacattgcaacaggagttgaactgtatttaaaacagaagcatattaatgactaaaaaaatgtgtatattaatctttagttcccttttgaggggattttgattgccagttctccgcagtgaaatgctaggaaaatgtctttagaagacagaattctttctgaatgcaagtctaaaatgcttaaaagagattaaaggttttaaagacccaaatcagaaatatccattagatacatctcatttgaatcctaagagtttaaacataataaacgctgtatttatttattttatttcttttttatttttttgaggcagagtctcactttgttgcccaggctggagtgcagtggtgcagtcttggctcactgcagcctgtcttctgggttaaaacgattctcct

SEQ ID NO: 754 - DNA, 667 bp, Homo sapiens
  misc_feature (1)..(667): n = a, t, g, or c
aagagttctgaagtgattttacttttatttccttcactttaagccaattatgaaatttcagtgatttctggggtaggggggtaaggcagtgttaagaatcattggggctgtggcccagtcagcctgcggaggtgcaggcagggtgggccctcatggggcagccggaggagcggactgccccgccggcaggtaggtcatgttccgagagcctccgcggcttccaacttgcacagctccatcaggccgtcccccgcggtgggccagtgagtttgcaatcagctcggttgccttggagtcgccctcagcagagatcacggctgcctttttctgctgctcaacctttttctgctgctcagcctttttctgctgctcagccttttccttcacaaatctggccctctctgcttcctgctgagccacctgtttggcttccactgcttctgtgaactcctttccaaaggtcagatatgtcaaggacacgtcgtccaggatgagcccaaatgtggctgcttgctccgtaaggtcgttgctcacctgcctggagaccagctctctctgagtgataacttctgcagcatcaaagcgagccaccactgactttgagatctcngtcgtgatgtacgtcagcacaggctcatcatagtccttctccggatgctggtgaaga

SEQ ID NO: 755 - DNA, 517 bp, Homo sapiens
  misc_feature (1)..(517): n = a, t, g, or c
gaggtcgtgacaggctcagcnggtggtctggaggggactcggaaataaattgtagcagctttcctgccgctggccctccccctgccaccctgtcgggtttccctgtttgggggtgggagcgtggaggagcccctggcagttggtggccagtgtagggctggccaggtnctggaggacatgcataccccagcactggtgagtggcaggaccacggggaggtggcacaggcctccctggagcnggattatctcggccccgccccccttcatttgggctcccgctgtgggcctggcctgggctgtgagcacagcttgccccnacctccggccatggctgtgnctggtgggtncgccggatgggagcccggggctcttgcttcctttncccgggaagttggttgcttccgggtngggaggnacagcattggnacaagaggggttttntttccanaggctgttcaagcaaagttnaagttgattccctgacaaagaagcatntgttttcccggngaacttgc

SEQ ID NO: 756 - DNA, 577 bp, Homo sapiens
tttttttaaaatagctctttgtttattcactttgatttggatcattggaaatattaaacaataaataaaacagagcgggggctgaggaaagcaggatcttgctgaagtcattcgaatgcatcccaaccagtgctcagctgcgtaacgacatggagagaggcaggggggaatagaaagcaaatttaaaaacaccaacacccaaacacacaagactgcacacaagaaaaagtgctcaagaaactttggctttgaagggaattcagtgaagggaagcgattgtgcaggaggaagggaagaaacccacgatcaccctaaggggcggggggctggagggcgaggccctgagacaggctagggttaaagctgacgtcccacagctcaggacgtacaaccgatggcagttttgtactaggaagaagctgagtgatgaggctgggtgatgggatcgcttgacgggctgggagggaggacaggaggtgtaaaggtggctcaccttcccctaggaaattcagtgctcttttggtaagaaaaaatagtcggtaatgccctgatcctgacaagctgtgagatgctgtct

SEQ ID NO: 757 - DNA, 601 bp, Homo sapiens
ttttttttttttttttttttttttttcctagtcaaaaatttactacacagactcagtagcggaaaaacatatcccataagcagaggacaaatcacagatgctcctcgacttacgatggagctacatccgaacaagctcatcgtcggccgacagatcgcacgcaagtgtcccacggatcgcacataagtggtccacagtcgacagaaacagacctagatatgacagtaataatgaattagcagaaaaggaacaattatcttaaatttgctccatatgctcgagggtattttttaaagcatgattatgattaaaagagaaatggaagacactggtgtgctttatttttttttttttttttgagaccgtcactctgtcacccaggctggaatgcagtagcgcaatcacggcccgctgcagcctcaaactcccaggctcaagcgatcctcccaccccagccccccgagcagccgggaccacaggcacgtgccaccaaacccggccaattttttttcttttaagacagattcccgctctgtcgcccagatacaatgaccaaattttcttcatcaattaaagaggtagaacaaagtccaaggaatgt

SEQ ID NO: 758 - DNA, 462 bp, Homo sapiens
aagaaacacaaaagcacagattcctttatttaacatgtatccagcatatactaagctggccactctggcagactcttggggccccaagaagaatacaacctgaatctcacatcaaagcttcaaagaccctggctttctgccccagctgacccctaagctgtagcactcacccaggtgctcctcaatcactgtattgtctgtcagagggatggtcttattcttgaccttggcttgtccacgtttcaaaatgagttctcggacagacttcagatttggaaatccccaggtcacataaggttccactatacgcagcatttttagattctggggggtgacttttacaaagacaccactaaaaattttctttaggcgaagtcttgcaatggttctctgcaccagtaaactcacgccgtcaatcctttcgatgcgtacaacaaaggccaaggaatgtttatctggcaa

SEQ ID NO: 759 - DNA, 773 bp, Homo sapiens; identical to SEQ ID NO: 160
  misc_feature (1)..(773): n = a, t, g, or c

SEQ ID NO: 760 - DNA, 679 bp, Homo sapiens
ggttgctacgatttctgcaaacggagacaaagaaattggcaatatcatctctgatgcaatgaaaaaagttggaagaaagggtgtcatcacagtaaaggatggaaaaacactgaatgatgaattagaaattattgaaggcatgaagtttgatcgaggctatatttctccatactttattaatacatcaaaaggtcagaaatgtgaattccaggatgcctatgttctgttgagtgaaaagaaaatttctagtatccagtccattgtacctgctcttgaaattgccaatgctcaccgtaagcctttggtcataatcgctgaagatgttgatggagaagctctaagtacactcgtcttgaataggctaaaggttggtcttcaggttgtggcagtcaaggctccaggtttggtgacaatagaaagaaccagcttaaagatatggctattgctactggtggtgcagtgttggagaagagggattgaccctgaatcttgaagacgttcagcctcatgacttaggaaaagttggagaggtcattgtgaccaaagacgatgccatgctcttaaaaggaccaggtgacaaggctcaaattggaaaaacgtattcaagaaatcattgaggcagttagatgtcacaactagtggatttgaccgggaaacttgaaggaacgggttggaaaat

SEQ ID NO: 761 - DNA, 952 bp, Homo sapiens
gctggcctggacagtatcccacatccaactccagcaacttcttctccatccctctaatgagactgaccatatgtgcttcacagtagagccagcttggggccaccaaagctgcccactgtttctcttgagctggcctctctagcacaatttgcactaaatcagagacaaaatatttcccatttgtgccagaggaatcctggcagcccagagactttgtagatccttagaggtcctctggagccctaaccccttccagatcactgccacactctccatcaccctcttcctgtgatccacccaaccctatctcctgacagaaggtgccactttacccacctagaacactaactcaccagccccactgccagcagcagcaggtgattggaccaggccattctgccgccccctcctgaaccgcacagctcaggaggcgcccttggcttctgtgatgagctgatctgcggatctcagctttgagaagccttcagctccaggaatccaagcctccacagcgagggcagctgctatttattttcctaaagagagtatttttatacaaacctacccaaatggaataaaaggcttgaagctgtggcctgagtgcctcactggcacaaacaacaacacacgcacacaccacgacgcaaccaaacgaccaacatacataagcaatcaaccaagaccggaacagcacacgaataacaacaaaaagaggggcgcgcgattatataaactgcgggggcgcaaatgagccgaccacgttgttttaacggaggggcccatagaaggaacacttattgaagggccgcggcgcggctaaacctacgtggagggaacctgcgcggcatcttaggaggacccatctgctggtcatatggcaccacgctagtgcccggaataacaacgcttagtgcaccatctcccgagcagtgcgattactacgcgcgacact

SEQ ID NO: 762 - DNA, 6662 bp, Homo sapiens
ggcggttaagtcctgtacctaggaaagagggcgagctctggggcgctctccggtgtcatgaggagcttcaaaagagtcaactttgggactctgctaagcagccagaaggaggctgaagagttgctgcccgacttgaaggtgggggtgctgcctggctcgggatacacctggctttccaaactgagctgttttgtgtttgccttttgaagagatggataagagttcctgtccaaccctccagctggttttcccagcagccgatctgatgctgagaggagacaagcttgtgatgccatcctgagggcttgcaaccagcagctgactgctaagctagcttgccctaggcatctggggagcctgctggagctggcagagctggcctgtgatggctacttagtgtctaccccacagcgtcctcccctctacctggaacgaattctctttgtcttactgcggaatgctgctgcacaaggaagcccagaggccacactccgccttgctcagcccctccatgcctgcttggtgcagtgctctcgcgaggctgctccccaggactatgaggccgtggctcggggcagcttttctctgctttggaagggggcagaagccctgttggaacggcgagctgcatttgcagctcggctgaaggccttgagcttcctagtactcttggaggatgaaagtaccccttgtgaggttcctcactttgcttctccaacagcctgtcgagcggtagctgcccatcagctatttgatgccagtggccatggtctaaatgaagcagatgctgatttcctagatgacctgctctccaggcacgtgatcagagccttggtgggtgagagagggagctcttctgggcttctttctccccagagggccctctgcctcttggagctcaccttggaacactgccgtcgcttttgctggagccgccaccatgacaaagccatcagcgcagtggagaaggctcacagttacctaaggaacaccaatctagcccctagccttcagctatgtcagctgggggttaagctgctgcaggtcggggaggaaggacctcaggcagtggccaagcttctgatcaaggcatcagctgtcctgagcaagagtatggaggcaccatcacccccacttcgggcattgtatgagagctgccagttcttcctttcaggcctggaacgaggcaccaagaggcgctatagacttgatgccattctgagcctctttgcttttcttggagggtactgctctcttctgcagcagctgcgggatgatggtgtgtatgggggctcctccaagcaacagcagtcttttcttcagatgtactttcagggacttcacctctacactgtggtggtttatgactttgcccaaggctgtcagatagttgatttggctgacctgacccaactagtggacagttgtaaatctaccgttgtctggatgctggaggccttagagggcctgtcgggccaagagctgacggaccacatggggatgaccgcttcttacaccagtaatttggcctacagcttctatagtcacaagctctatgccgaggcctgtgccatctctgagccgctctgtcagcacctgggtttggtgaagccaggcacttatcccgaggtgcctcctgagaagttgcacaggtgcttccggctacaagtagagagtttgaagaaactgggtaaacaggcccagggctgcaagatggtgattttgtggctggcagccctgcaaccctgtagccctgaacacatggctgagccagtcactttctgggttcgggtcaagatggatgcggccagggctggagacaaggagctacagctaaagactctgcgagacagcctcagtggctgggacccggagaccctggccctcctgctgagggaggagctgcaggcctacaaggcggtgcgggccgacactggacaggaacgcttcaacatcatctgtgacctcctggagctgagccccgaggagacaccagccggggcctgggcacgagccacccacctggtagaactggctcaggtgctctgctaccacgactttacgcagcagaccaactgctctgctctggatgctatccgggaagccctgcagcttctggactctgtgaggcctgaggcccaggccagagatcagcttctggacgataaagcacaggccttgctgtggctttacatctgtactctggaagccaaaatacaggaaggtatcgagcgggatcggagagcccaggcccctggtaacttggaggaatttgaagtcaatgacctgaactatgaagataaactccaggaagatcgtttcctatacagtaacattgccttcaacctggctgcagatgctgctcagtccaaatgcctggaccaagccctggccctgtggaaggagctgcttacaaaggggcaggccccagctgtacggtgtctccagcagacagcagcctcactgcagatcctagcagccctctaccagctggtggcaaagcccatgcaggctctggaggtcctcctgctgctacggattgtctctgagagactgaaggaccactcgaaggcagctggctcctcctgccacatcacccagctcctcctgaccctcggctgtcccagctatgcccagttacacctggaagaggcagcatcgagcctgaagcatctcgatcagactactgacacatacctgctcctttccctgacctgtgatctgcttcgaagtcaactctactggactcaccagaaggtgaccaagggtgtctctctgctgctgtctgtgcttcgggatcctgccctccagaagtcctccaaggcttggtacttgctgcgtgtccaggtcctgcagctggtggcagcttaccttagcctcccgtcaaacaacctctcacactccctgtgggagcagctctgtgcccaaggctggcagacacctgagatagctctcatagactcccataagctcctccgaagcatcatcctcctgctgatgggcagtgacattctctcaactcagaaagcagctgtggagacatcgtttttggactatggtgaaaatctggtacaaaaatggcaggttctttcagaggtgctgagctgctcagagaagctggtctgccacctgggccgcctgggtagtgtgagtgaagccaaggccttttgcttggaggccctaaaacttacaacaaagctgcagataccacgccagtgtgccctgttcctggtgctgaagggcgagctggagctggcccgcaatgacattgatctctgtcagtcggacctgcagcaggttctgttcttgcttgagtcttgcacagagtttggtggggtgactcagcacctggactctgtgaagaaggtccacctgcagaaggggaagcagcaggcccaggtcccctgtcctccacagctcccagaggaggagctcttcctaagaggccctgctctagagctggtggccactgtggccaaggagcctggccccatagcaccttctacaaactcctccccagtcttgaaaaccaagccccagcccatacccaacttcctgtcccattcacccacctgtgactgctcgctctgcgccagccctgtcctcacagcagtctgtctgcgctgggtattggtcacggcaggggtgaggctggccatgggccaccaagcccagggtctggatctgctgcaggtcgtgctgaagggctgtcctgaagccgctgagcgcctcacccaagctctccaagcttccctgaatcataaaacacccccctccttggttccaagcctcttggatgagatcttggctcaagcatacacactgttggcactggagggcctgaaccagccatcaaacgagagcctgcagaaggttctacagtcagggctgaagtttgtagcagcacggataccccacctagagccctggcgagccagcctgctcttgatttgggccctcacaaaactaggtggcctcagctgctgtactacccaactttttgcaagctcctggggctggcagccaccattaataaaaagtgtccctggctcagagccctctaagactcagggccaaaaacgttctggacgagggcgccaaaagttagcctctgctcccctgagcctcaataatacctctcagaaaggtctggaaggtagaggactgccctgcacacctaaacccccagaccggatcaggcaagctggccctcatgtccccttcacggtgtttgaggaagtctgccctacagagagcaagcctgaagtaccccaggcccccagggtacaacagagagtccagacgcgcctcaaggtgaacttcagtgatgacagtgacttggaagaccctgtctcagctgaggcctggctggcagaggagcctaagagacggggcactgcttcccggggccgggggcgagcaaggaagggcctgagcctaaagacggatgccgtggttgccccaggtagtgcccctgggaaccctggcctgaatggcaggagccggagggccaagaaggtggcatcaagacattgtgaggagcggcgtccccagagggccagtgaccaggccaggcctggccctgagatcatgaggaccatccctgaggaagaactgactgacaactggagaaaaatgagctttgagatcctcaggggctctgacggggaagactcagcctcaggtgggaagactccagctccgggccctgaggcagcttctggagaatgggagctgctgaggctggattccagcaagaagaagctgcccagcccatgcccagacaaggagagtgacaaggaccttggtcctcggctccagctcccctcagcccccgtagccactggtctttctaccctggactccatctgtgactccctgagtgttgctttccggggcattagtcactgtcctcctagtgggctctatgcccacctctgccgcttcctggccttgtgcctgggccaccgggatccttatgccactgctttccttgtcaccgagtctgtctccatcacctgtcgccaccagctgctcacccacctccacagacagctcagcaaggcccagaagcaccgaggatcacttgaaatagcagaccagctgcaggggctgagccttcaggagatgcctggagatgtccccctggcccgcatccagcgcctcttttccttcagggctttggaatctggccacttcccccagcctgaaaaggagagtttccaggagcgcctggctctgatccccagtggggtgactgtgtgtgtgttggccctggccaccctccagcccggaaccgtgggcaacaccctcctgctgacccggctggaaaaggacagtcccccagtcagtgtgcagattcccactggccagaacaagcttcatctgcgttcagtcctgaatgagtttgatgccatccagaaggcacagaaagagaacagcagctgtactgacaagcgagaatggtggacagggcggctggcactggaccacaggatggaggttctcatcgcttccctagagaagtctgtgctgggctgctggaaggggctgctgctgccgtccagtgaggagcccggccctgcccaggaggcctcccgcctacaggagctgctacaggactgtggctggaaatatcctgaccgcactctgctgaaaatcatgctcagtggtgccggtgccctcacccctcaggacattcaggccctggcctacgggctgtgcccaacccagccagagcgagcccaggagctcctgaatgaggcagtaggacgtctacagggcctgacagtaccaagcaatagccaccttgtcttggtcctagacaaggacttgcagaagctgccgtgggaaagcatgcccagcctccaagcactgcctgtcacccggctgccctccttccgcttcctactcagctactccatcatcaaagagtatggggcctcgccagtgctgagtcaaggggtggatccacgaagtaccttctatgtcctgaaccctcacaataacctgtcaagcacagaggagcaatttcgagccaatttcagcagtgaagctggctggagaggagtggttggggaggtgccaagacctgaacaggtgcaggaagccctgacaaagcatgatttgtatatctatgcagggcatggggctggtgcccgcttccttgatgggcaggctgtcctgcggctgagctgtcgggcagtggccctgctgtttggctgtagcagtgcggccctggctgtgcatggaaacctggagggggctggcatcgtgctcaagtacatcatggctggttgccccttgtttctgggtaatctctgggatgtgactgaccgcgacattgaccgctacacggaagctctgctgcaaggctggcttggagcaggcccaggggccccccttctctactatgtaaaccaggcccgccaagctccccgactcaagtatcttattggggctgcacctatagcctatggcttgcctgtctctctgcggtaaccccatggagctgtcttattgatgctagaagcctcataactgttctacctccaaggttagatttaatccttaggataactcttttaaagtgattttccccagtgttttatatgaaacatttccttttgatttaacctcagtataataaagatacatcattt

SEQ ID NO: 763 - DNA, 537 bp, Homo sapiens
  misc_feature (1)..(537): n = a, t, g, or c
aggtgcacaaaacaaagggtttattgtagggcgagaagtaccgcgtggataataaggtcgtctgggaaggagtgacgtcggagtagagctgaaaggagagggagcgagtgggggagtgcctagcacgttgaagagccgcaaagaggaaggagggcgcagggacagaggccgatgagaaaggcaggaccaccgcgcagcacactaaggacttgcgtttactccgagtgagatgcggtgctgagcatcggctgtgtagactgaggcgcgccggccgttgcccctcaagtccccgagccagcgctcagcccggctgccccgcagctcccacggccacacgattccccatcccgcgcgcccactcgcctcgtgcgggccgtagaccacagccagtgccttggtgttgccctgctcaatgtaggccgagccgtcagcctgcgcgaacacgcccatccgcgcctggatcttgcgcagcttccccggcgcgccgccgtccacccggtagccctggtccgacaagagctccagccncgccatgct

SEQ ID NO: 764 - DNA, 2095 bp, Homo sapiens
ccgagggtagcttgagcgcggcggcggcgttgttcagtcagagcgagaacattccagaggtcgcccagctccggcgctgacgggtgtggaccgcggacgtcgctgggacagcccctccccgctgctcggcggcggcacctggcccggccgctcctcgctgcgcttcgcctccgcctcctcggactcggactcgggtttatatcgcgcctcacttcatcccagtcccgggcgagcagcgttgggtttatgtctttatttgacgaaaacgagctgttgcgcagccattggtacctgtattggggaaacatagcatacaagcaagaagcttacagcctcagtggcgaaaattttttcatgtcagagaccgagaactcttgcagtcgtttatgtcatcccttcttctccagacagaagataccaaaaagttgcaatcaaagatcttttcatcttattgataaagccactaataagccaaaatgtctgtcaatgtcaaccgcagcgtgtcagaccagttctatcgctacaagatgccccgtctgattgccaaggttgagggcaaaggcaatggaatcaagacagttatagtcaacatggttgacgttgcaaaggcgcttaatcggcctccaacgtatcccaccaaatattttggttgtgggctgggagcacagacccagtttgatgttaagaatgaccgttacattgtcaatggatctcatgaggcgaataagctgcaagacatgttggatggattcattaaaaaatttgttctctgtcctgaatgtgagaatcctgaaacagatttgcatgtcaatccaaagaagcaaacaataggtaattcttgtaaagcctgtggctatcgaggcatgcttgacacacatcataaactctgcacattcattctcaaaaacccacctgagaatagtgacagtggtacaggaaagaaagaaaaagaaaagaaaaacagaaagggcaaagacaaggaaaatggctccgtatccagcagtgagacaccaccaccaccaccaccaccaaatgaaattaatcctcctccacatacaatggaagaagaggaggatgatgactggggagaagatacaactgaggaagctcaaaggcgtcgaatggatgaaatcagtgaccatgcaaaagttctgacactcagtgatgatttggaaagaacaattgaggagagggtcaatatcctctttgattttgttaagaaaaagaaagaagagggtgttattgattcatctgacaaagaaatcgttgctgaagcagaaagactggatgtaaaagccatgggccctcttgttctaactgaagttctttttaatgagaagattagagaacagattaaggaatacaggcgccatttcctacgattttgtcacaacaacaaaaaagcccaacggtaccttcttcatggtttggagtgtgtggtagcaatgcatcaagctcagcttatctccaagattccacatatcttgaaggagatgtacgatgcagaccttttagaagaagaggtcatcatcagctggtcggaaaaggcctctaagaaatatgtctccaaagaacttgccaaagagattcgtgtcaaagcagaaccatttataaaatggttgaaggaggcagaggaagaatcttctggtggcgaagaagaagatgaagatgagaacattgaggtggtgtattcgaaggctgccagtgtaccgaaagttgagactgtaaagtcagacaacaaggatgacgacatcgatattgatgccatttaaagggatggatgcaacctagcttaacagtataatgctgcaaattttcctccataatcagccagaagtgcaacatgtatgtgcaaaagctaaaatggcttaacatcatgctacactttacactaaaaatctattactgtgagtggtctgttattaagcccaatgagacatctagggagtccatacacatcagtgagcagatgtagtttgcttatttatagcatgtttctttttgaaaaactagtggtggacacatttggatcacatttatacagttataaaaataaaggtttgattttggtcgttcaaaaaaaaaaaaaaaaaaa

SEQ ID NO: 765 - DNA, 1755 bp, Homo sapiens; identical to SEQ ID NO: 64

SEQ ID NO: 766 - DNA, 859 bp, Homo sapiens
ttttttttttttaaagaggcagagtctctattgcgccagctagagtacaggggtatggccacagctcattccagccttcaactcctgggctcaaatgatcctctcaagcagctcctaagtagctgtgactacaggcatgtgatactgcacctggctaaattttaaattttttttgtagagataggttctcactgcgttggccaggctggtctcatactcctgggcgcgagggatcctcccacctcaacctcccaaagtactgggattacaggcttgagccatggcacccagcctcaagtagtttctatgtacactgttttatttaatcattgccctaatacttatcgacaagagtttctatttttaagtatgtaaaaggctaagatgctggggaacataataaatatctatagtacagatctgccttttgaataattcacaaaatttcttacctgcagccaaaaggtctaacagcactgtagagtgtatatgcatgcacatacatggccactctgtctgcaagatgttttagtggaatgttgtagccaaagttagatctgaagttggaagcttcttctcttgctatgctgctaaagaacgagcatctgccaacaaaccctgtactgccatttccaacatggcgatcaacatttaaaaagtctttttgttgaaaccttctttcataaggttagaaagggactaattttctacccccaaagacaaccaccatcttttgatctgattcccaatagctggactactattttccccggccttcatagcaattttcaacttgaaaaacccctccccgaagaaaaagaatgttaggctgacggcattacccagcccattgaggctc

SEQ ID NO: 767 - DNA, 822 bp, Homo sapiens; identical to SEQ ID NO: 279
  misc_feature (1)..(822): n = a, t, g, or c

SEQ ID NO: 768 - DNA, 489 bp, Homo sapiens
tttttcagatggagtctccctctgttgcccaggctggaatgcagtggcgtgatcttggctcactacaacctctgcctcttgggttcaagcaattctcctgcctcagccaccccaagtagctgggcacacaggcacgtgccaccatgcccagctaaattttttttgtatttttagtacacacaaggtttcaccatgttggctaggatggtcttcaactcttgacctcaggtgatccatccgccttggcctcccaaagtgctgggattataggcgtgagccaccgcaccaggtccacatctgttatttttatcaacattttccaaaaacataaaaaccttagagaagtcacatggttcttacctgctgcatagccagttcaatctcatctttcttgcttactttatctccctccacattatcgtcttgaaatttaaactgacgcagtctgtcagagccaccaaagcgacttagtagttctaagcactggcg

SEQ ID NO: 769 - DNA, 493 bp, Homo sapiens
atcagatgatgttttatttgaacagcattctgtgcagaacagaatggctaaaatgatcatttattttaccttcacatgatttataataatgactgaaaaaaatcatagcataaagccaataatgacagcagaagtctttttattcaaatctcccaccttacagatgtccagaataatcaacatatttcaaagggtatatttcaaaaacgtactagcaactcagccagccactgtcacatggaataagaagacatgcccctggccattagaaccatgctgtcctcgctcttgtgtccctccacgggacagacatcaccttgcaagacaactcgtgccactgtccccaacagttttccacagagttcttgtttcccttcatctgaatcttctctgtgcaatttgatgtcctgaactatttctgacggttgcacacaagatctcagggactggaccttttagttatgagaccagccctcttagacagcagacagta

SEQ ID NO: 770 - DNA, 697 bp, Homo sapiens
  misc_feature (1)..(697): n = a, t, g, or c
tttaagagacggggtcttactctgtcaaccaggcaggagtgcagtggtgcaatcacagctcactgcagcctcaatctcctgggttcaggtgatcctcccacctcagcctcctcagcagctgggggtatgagcatgagccctcatacccagctgtaactagttttaaagaataaaaattatctgacacattaaaatttctttcttccccaagagatagaaagcaaacactatcagattcccttttgtaacctcacaagatactcaaaaatatcactgtcatactgaaagatgatagaaaatagtcaaacaattcatacttttcttaatatagcatgaatatccctccacttcagagtggttaccttgtgaaaatatatgtaaccctgcgtaagttcatctgatccttctccagagaagatcaccacgctatctgtgttcttccgaatatacttggaaattaaatacatacctactgaagcacgaactgttgtaatgtcataagtttccaaggaaaatatgacttcatccagagcctgaatgccttcctcagagttaaaaaggacttcataatgttcacttncaatatgatctgccacctttctagcagccagtaaatccgggctgtcttccatgccaattgcaaatgtcttgagaggatactgtacttgggctcttttcactgcttccacagagtggc

SEQ ID NO: 771 - DNA, 454 bp, Homo sapiens; identical to SEQ ID NO: 232
  misc_feature (1)..(454): n = a, t, g, or c

SEQ ID NO: 772 - DNA, 431 bp, Homo sapiens
tttttttttttttaccctatgtgcataggagtcctcggtctttattaattctcctctagtacaacatctggcactagaatggcagcatatatgtaggtgagtgtgtaggtcttgtcatatctgcaccctcatgacagtcttgtcagcccaactcagtgttctggacatctaaagtcacacagtgactggcagccctggctttggggttccctgtggcctcctgcagtttccttgctcctgctcctcagggcccacagcacctctgtggcaggttcccacagtgccagcccaggttccggcgtctgaacacagctgccaggtcaccagggcagccttccttctaccctcctcctgatcaaacaggccctcagtctcaggcccaggagaccgatggccagcaacagggaccctttctttgctccccggctaac

SEQ ID NO: 773 - DNA, 368 bp, Homo sapiens; identical to SEQ ID NO: 588

SEQ ID NO: 774 - DNA, 459 bp, Homo sapiens
tctcacctttttgatggccggattcccgtgctgcttttcctagctatctgagggacttaggattcggacagtgcttctcagatgagctccctgtgtagcaggagcagggagcctgggcctgggtgttcctcctgggtctcagccagggatgcgggcatccagggtcagtccaccctgcccggtcaggaggttgtctctggaagcctctcttgacttgtgcccagtgccgtgggaccaggagccaccaaccaactcgttctcaggggcacaactgtgtgctggcagttggaggagaaagttaagtagtagatgatgtgggtgagtttgagaaaggcttgtgtggactaatggatttgtgaatgtgagtcatttcaaaaactaacgaaaaagttttgaatctttgataatgaaacacttcactgtttttcaaaggggacgcttataagaatatttgatact

SEQ ID NO: 775 - DNA, 565 bp, Homo sapiens
ttagtgagacagggtcttgctatgttacccaggctggtctcccatctcagcctcccaagtagctggtatcacaagcacaagccagcacacccagccctcatgttttctttcatttctgatgaatcctctgcacctagtccagtcttggccacgtagcacatgctccatagatgcctgttgaatagctcagtgccaagagtggaagggatgcgggggttaagaagggcaggcaaagaatgcctgtgtgtatgtgagatctcaaaataaatcatttttatagtatttacactctctattaggtcaggttattcagtgtacatgaaaagaaggaaaaaaaagcaatgcaacaatatgaagtaaccaactcaatgaatcctatgctgggaggaagcattttaatcagatggtcggggatggtaacactgtacagggagaactcacagctgcaagagcttccctccaaattatgatgaagttcctgtaaataactagatttcctacagcctggtcctctgcccattggaaggaggggaaatggatttgaaagccatgtggtctgccctcc

SEQ ID NO: 776 - DNA, 608 bp, Homo sapiens; identical to SEQ ID NO: 608

SEQ ID NO: 777 - DNA, 807 bp, Homo sapiens
gaaaacctaccctccctttgtaaacttctttgaaatgagcaaggaaacaattattaaatgtgaaaaacagaaaccaagatttcatgcttttctcaagataaaccaagcaaaaccagaatgtggacggcagagccttgtgaacttcttatccgaccagtacagaggttacccagtgttgcattacttttaaatgatcttaagaagcatacagctgatgaaaatccagacaaaagcactttagaaaaagctatggatcactgaaggaagtaatgacgcatattaatgaggataagagaaaaacagaagctcaaaagcaaattttgatgtgtttatgaagtagatggatgcccagctaatcttttatcttctcaccgaagcttagtacagcgggttgaaacaatttctctaggtgagcacccctgtgacagaggagaacaagtaactctcttcctcttcaatgattgcctagagatagcaagaaaacggcacaaggttattggcacttttaggagtcctcatggcaaacccgaccccagcttctcttaagcatattcacctaatgcctctttctcagattacagaaggtatcggcaccatacagagagacagaaagatgccataatggctttgccttgctttgtgaggccaccaaacagagcaggcaatgtgctactcagtttcccagatgacccaagatgaacttccaaaagaaaactggtaaaaaatgctgtgtcgaccttgtgctaaacacatttgtaaagcagagctgagatcttattataactggtgatccaaatcttgacatca

SEQ ID NO: 778 - DNA, 487 bp, Homo sapiens
  misc_feature (1)..(487): n = a, t, g, or c
acttatccatcttaagatctgtagctgggattttctgacttgtaatgagcagggggattgctttttcactttgtgacactctttagagctttaatgcttcacagtatatggcctggtctcatccttgcgtgttccacttgaggccctttggtgtcttgccccattcttgtgtttataaaatgtttgagtatttctgatgagtgatgcttgccttagtctcatgaattcagatcccttcatgtcctttaagtatgctcctcaatgtgtaaacacggaacaactttatgatttgaaagctttaaaggagattcttctcccacccccaactttatttgcaatggggatttttcctaggagagttatgaaaagttgaaggcttctaagggaatactgtaaacatgacccacttatatttatcacagtgaaaggcaaaattattcactcagaagtaatataaatnacctctttaaaaagtaaccagaatttg

SEQ ID NO: 779 - DNA, 655 bp, Homo sapiens
ttttgacgttgtctctcaacaatacctgaagtgtctcatactcatcatcccaagtctgaaaaacttcaaagcatgctaccataactttttcaaattcttcataagcaacatgcatcaatttcctagtgcccaatactttgagtaattgagaactcaagtctcttgaaattgcctccaccaaacgcagtgccctctgaataggatattatgtgtttcggatctttctcaaatgtgtgaaaatggcaacaagcgcctgtcttattttgtccagctccgtggcagacagcaaatcattcagagggaaatctttcatcagaggattgtagtcattcacagtttccaaagcctgtgttagacctgtgtcagtgtcaaaactgacggtggcatggaagcgcttgccatgtttcaagatatccagagtcaggagaacttccgggctctcccgtttctcctggatgcggtataacgcacgttccaagtttagccaaaaactaattctctgtaaggcagtgcctgatgcaggatctcgatccagtttggtcacttttcgaatttctcggatccagcggctaacttcagattgtaactgattaagatatgttgggtcatcaaccttatcacctaagtccgtaactattggcttttcttcacgctc

SEQ ID NO: 780 - DNA, 2852 bp, Homo sapiens
gttcctgcttcggagtcggcggtggtcgtccagaccgagtgttctttactttttgtttggttgaggtttcacgctagaaggtggctcaggatgtcttcatcacattttgccagtcgacacaggaaggatataagtactgaaatgattagaactaaaattgctcataggaaatcactgtctcagaaagaaaatagacataaggaatacgaacgaaatagacactttggtttgaaagatgtaaacattccaaccttggaaggtagaattcttgttgaattagatgagacatctcaagggcttgttccagaaaagaccaatgttaagccaagggcaatgaaaactattctaggtgatcaacgaaaacagatgctccaaaaatacaaagaagaaaagcaacttcaaaaattgaaagagcagagagagaaagctaaacgaggaatatttaaagtgggtcgttatagacctgatatgccttgttttcttttatcaaaccagaatgctgtgaaagctgagccaaaaaaggctattccatcttctgtacggattacaaggtcaaaggccaaagaccaaatggagcagactaagattgataacgagagtgatgttcgagcaatccgacctggtccaagacaaacttctgaaaagaaagtgtcagacaaagagaaaaaagttgtgcagcctgtaatgcccacgtcgttgagaatgactcgatcagctactcaagcagcaaagcaggttcccagaacagtctcatctaccacagcaagaaagccagtcacaagagctgctaatgaaaacgaaccagaaggaaaggtgccaagtaaaggaagacctgccaaaaatgtaaaaacaaaacccgacaagggtatttcttgtaaagtcgatagtgaagaaaatactttgaattcacaaactaatgcaacaagtggaatgaatccagatggagtcttatcaaaaatggaaaacttacctgagataaatactgcaaaaataaaagggaagaattccttcgcacctaaggattttatgtttcagccactggatggtctgaagacctatcaagtaacacctatgactcccagaagtgccaatgcttttttgacacccagttacacctggactcctttaaaaacagaagttgatgagtctcaagcaacaaaagaaattttggcacaaaaatgtaaaacttactctaccaagacaatacagcaagattcaaataaattgccatgtcctttgggtcctctaactgtttggcatgaagaacatgttttaaataaaaatgaagctactactaaaaatttaaatggccttccaataaaagaagtcccatcacttgaaagaaatgaaggtcgaattgctcagccccaccatggtgtgccatatttcagaaatatcctccagtcagaaactgagaaattaacttcacattgcttcgagtgggacaggaaacttgaattggacattccagatgatgctaaagatcttattcgcacagcagttggtcaaacaagactccttatgaaggaaaggtttaaacagtttgaaggactggttgatgattgtgaatataaacgaggtataaaggagactacctgtacagatctggatggattttgggatatggttagttttcagatagaagatgtaatccacaaattcaacaatctgatcaaacttgaggaatctgggtggcaagtcaataataatatgaatcataatatgaacaaaaatgtctttaggaaaaaagttgtctcaggtatagcaagtaaaccaaaacaggatgatgctggaagaattgcagcgagaaatcgcctagctgccataaaaaatgcaatgagagagagaattaggcaggaagaatgtgctgaaacagcagtttctgtgataccaaaggaagttgataaaatagtgttcgatgctggatttttcagagttgaaagtcctgttaaattattctcaggactttctgtctcttctgaaggcccttctcaaagacttggaacacctaagtctgtcaacaaagctgtatctcagagtagaaatgagatgggcattccacaacaaactacatcaccagaaaatgccggtcctcagaatacgaaaagtgaacatgtgaagaagactttgtttttgagtattcctgaaagcaggagcagcatagaagatgctcagtgtcctggattaccagatttaattgaagaaaaccatgttgtaaataagacagacttgaaggtggattgtttatccagtgagagaatgagtttgcctcttcttgctggtggagtagcagatgatattaatactaacaaaaaagaaggaatttcagatgttgtggaaggaatggaactgaattcttcaattacatcacaggatgttttgatgagtagccctgaaaaaaatacagcttcacaaaatagcatcttagaagaaggggaaactaaaatttctcagtcagaactatttgataataaaagtctcactactgaatgccaccttcttgattcaccaggtctaaactgcagtaatccatttactcagctggagaggagacatcaagaacatgccagacacatttcttttggtggtaacctgattactttttcacctctacaaccaggagaattttgaatttaaaaataaatccaaacattttccttcatattatcaatgcttatatattccttagactattgaaattttggagaaaatgtatttgtgttcacttctatagcatataatgttttaatattctgtgttcatcaaagtgtattttagatatactctttctcaagggaagtggggatattttgtacattttcaacacagaataaaaaatgtactgtgccttg

SEQ ID NO: 781 - DNA, 537 bp, Homo sapiens
tttttttttttttttttttttttggcaagggctgcgcggcattttattttctgaaccccccacagcaggggcagccagtcctgctgcaggcaaaatttcagtcttcggagtttgaccttttggcccaaggtcatcacaaccacaggcggaggctctggggaaaggtccaattcctgggatgctggcccctaaagatggggcccatctttccagtgccgcccttccctcccgcctggcacaggagttctggagccacggtcctgagtctacaaaacagcccggtcagcctcgtcccgcggtgcaagcaaggcctggcctccctccctgcctgtccttggcccggccacatcactccctgcgtttcttcttcttctccggctcctggacattggccgcctttgctcgggcactggtcaggggccgaggtgtcctccttctctggcgagcccctctttggccacggcccctgggctgatctcggagcaaggcccgctcaactgtgcctggctgctcaccagcctcttgccgcgccttggg

SEQ ID NO: 782 - DNA, 548 bp, Homo sapiens
caacttaggctaggtacgaggccgggtgttaatctattcgaatctttcctgctagacaagtagtcgaagcaggcaggtatatcatacaaagagaatgcaacatgttatctgtgtaaaatggacttctgacagcaagtatattatgtgtggatctgatgaaatgaacattcgcctgtggaaagctaatgcttctgaaaaattgggtgtgcttacatcacgagaaaaagcagccaaggattataaccagaaattgaaggagaaatttcagcattatcctcatataaaacgtatagctcgtcatcgacatctaccaaaatctatctatagccagattcaggaacagcgcatcatgaaagaagctcgtcgacgaaaggaagtgaatcgtattaaacacagcaagcctggatctgtgccacttgtgtcagagaagaagaaacacgtagtggcagttgtaaaataattggtattcctaacaatcctgatgtataattcattctgttacttttgatttgagaactctacaaataaaagtgctgggactagattca

SEQ ID NO: 783 - DNA, 3347 bp, Homo sapiens
tgcccaagacgggtctggagcctgacttccgggtgtccatgaccctggcggctgcttccggtccgccatgaaagggctatcaggcagccgcagccatcaccacggggtcacctgcgactcggcctgtgactcgctgtcgcaccactccgaccgcaagccctacctgctgagcccagtggagcaccaccccgcagaccacccatactacacccagcggaactccttccaggctgagtgcgtgggccccttcagcgacccgctggccagcagcaccttcccccgcaggcactacacctcgcagcaagagctgaaggacgagtgtgccctggtgccccgcaccctggccaccaaggcgaaccgcatccccgccaacctgctggaccagttcgagcggcagctgccactcagccgcgatggctatcacaccctgcagtacaagcgcacggccgtggagcaccgcagcgacagccccggccgcatccgccacctggtgcactcggtccagaagctcttcaccaagtcgcactccctggaggggccgtccaagggcagcgtcaacgggggcaaggccagccctgacgaggcgcaggcggcgcgctatggcaaacgcagcaagagcaaggagcggcgcgcggagcccaaggcccggcccagcacctccccgggctggtggagctcggacgacaacctggatggtgacatgtgcatctaccacgccccctcgggcgtgatgaccatgggcaggtgccccgaccgctcggcctcacagtacttcctggaggcctacaacaccatcagcgagcaggcggtgaaggcctcccggagcaacaacgacgtcaagtgctccacctgcgccaacctgccggtcagcctggacaccccgctgctgaagaagagcgcctggtcctccacgctcaccgtgagccgggcccgggaggtttaccagaaggcctcggtgaacatggaccaggccatggtgaagtccgagtcgtgtcagcaagaacgctcctgccagtacctgcaggttccacaagatgaatggacagggtacaccccacgaggtaaagatgatgaaattccatgccgaagaatgcggagtggcagttatatcaaggccatgggggatgaagacagtggagactcagacacgagtcctaagccttctccaaaagttgctgcgcggagagaaagctatctcaaggctactcagccatcccttacagaactcaccacactcaaaatctccaatgaacactcacccaaactccagatccggagtcatagttacctgagggcagtgagtgaagtctccatcaaccggagcctggacagcctggaccctgcaggcttgctcacatcaccaaagttccgctccaggaatgagagctacatgcgagccatgagcaccatcagccaggtgagcgagatggaagtgaacgggcagttcgagtccgtgtgcgagtccgtgttcagcgagctggagtcgcaggccgtggaagcgctggacctgcccatgcccggctgcttccgcatgcggagccacagctatgtgcgggccattgagaaaggctgctcccaggacgacgagtgcgtgtccctgaggtcgtcctcgccgccgcgcaccaccaccaccgttaggaccatccagagcagcacggtgtcatcttgcattacaacatataagaagacaccacctccagtcccacccagaactaccacgaaacctttcatttctatcacagcccagagtagcacagagtcagcccaggatgcctacatggacggacagggccagcgaggagatattatcagccagtctggactcagcaactccaccgagagcctggacagtatgaaggctctgacagccgccatcgaagctgcaaacgcccagatccatggccctgccagtcaacacatgggcaataacactgccactgtcaccaccacgactaccatagccaccgtcaccacggaggacaggaagaaggaccactttaagaaaaatcgatgcctgtctatcgggatacaggtggatgatgctgaagaacctgacaaaacaggggagaataaagcacccagtaagttccagtccgtgggagtgcaagtagaagaagagaagtgcttccgcaggttcactcgatccaacagtgtgacgacagcagtacaggccgacctggacttccatgataatctggaaaattctctggaatctatagaggacaattcgtgtcctggccccatggccagacagttctcccgcgatgccagcacctccacagtcagcattcagggctcaggaaaccattaccatgcctgtgccgccgatgatgactttgacacggattttgacccctctattctgcctcctccggacccctggattgactctatcactgaagaccctctggaggccgtgcaaaggtcagtgtgccaccgggatggccactggttcctgaagcttctccaggcagagcgagaccgcatggaggggtggtgtcaacagatggagcgggaagaacgggaaaacaacctgcccgaagacattctaggaaaaatccgaaccgcagtgggcagtgcccaacttctcatggcccagaaattctaccagttcagagaactgtgtgaagaaaacctgaatcctaatgctcatccaagacccacctcccaggatttggcggggttttgggacatgctgcagttgtccatagaaaatattagtatgaaatttgatgaacttcatcagttaaaggccaataattggaaacagatggatcctcttgacaagaaggagagaagggcccctcctccagtgccaaagaagccggcgaagggccccgcgccgctgatccgggagcgctcgctggagagctcgcagcgccaggaggcccgcaagcgcctgatggccgccaagcgcgccgcgtccgtccgccagaactcggccaccgagagcgccgagagcatcgagatctacatccccgaggcgcagacccggctctgagcgccccgcagcccggccgccgccgccaagcatctgtcccctcctcccccggccgctcctctgccggctgcctctccccctccgagcccgtccgctcccgagctcggtgacttccactgtcgcggtgtagttgtccacctcgcaggagccgccccccgggcccccctcagccccccacttcccgtacccgtttgcccatctccttcttcaccgagcttcgccccctgtcctgatgccgtcgccctgcctcatactgagatccaaccctttattttctgggcaaagccaaacccacctgtgtagaagtgatgcctttaggtcacccgccgtcctcagttctctcgag

SEQ ID NO: 784 - DNA, 494 bp, Homo sapiens
ttttttttgttgcaaccttataatttctgctttaatggcaatcaagtttaaaaaatgtacaattccacttatccatactattcctttataaaaggcagatttcaggtaagcttctaaatgcatgcgtaatgtagaggctaatattttctggcagtccttggttcctgaaatttgaacttcatatgtgttttaaacttttgtcaaaatagtcatgaaagatatgttatttttgcataatgaggtaatatatcaggggcgggcactcataagacagtataaatccacttgtctaaacttgcatgaggctgtgtgcattgtaaaatgccataaagagttttgggtcagtgaatattttgctgaaggaataacacttacatttaactgagcacttttctgtaataaataccaaagtaggtttttgtagctgtaaactgtgtacacagataactacaggctggtctgtcatggagctaaaagtttcacctggaaaacag

SEQ ID NO: 785 - DNA, 840 bp, Homo sapiens; identical to SEQ ID NO: 26

SEQ ID NO: 786 - DNA, 991 bp, Homo sapiens
  misc_feature (1)..(991): n = a, t, g, or c
gaattcggcagagcttatggaagcaaagactcttggaactgtaacgcccagaaaacctgtcttatctgtcagtgcaagaaaaattaaggacaatgcggctgattggcacaatttaatcctgaagtgggaaaccctcaatgatgcaggttttaccactgcaaataatattgccaacttgaaaatcagtttattgaataaagacaagatagaactagacagcagcagcccagcctcgaaggaaaatgaagaaaaggtgtgtctggaatataacgaggaactggagaagctgtgtgaggaactgcaggccaccttggatgggttgaccaaaatacaggtgaaaatggaaaagctgtcttcaactaccaagggaatttgtgaactagaaaactaccattatggggaggagagtaaacgaccccctctgttccacacgtggcctanaacccatttctatgaggtttcgcataagctcttggagatgtacaggaagggagctgctcctgaagcacacggtggccaaggagcttgcccaaaccggggntcccgnccncaccctgagctacctgnccatgtgggtgcaccagcccctatgtggnagagcgcaagcagggtgcatctgggngagcatgcttcctgggaaaaggccaccnggggtctcngncgccctgnaacnggctgngggaantggnnnccttcccagggntnnncnngggaaaaaagnnttnccaagggcccaagntgccggccggntgggantanacccccaggggtnnagncctttttngggggctttnnggcaanannnttggnaacaancccaanggggtcnncaangggggnntntcccaaaaaccngggggnaancccaagggggnggggnanccnnttgtggccccccnngggantgtntcgggggggnnaanaaaacaagggnttttggnaaaaaaaannnntnncnnanaagaaaaaaaaccnggggggnnggccnntt

SEQ ID NO: 787 - DNA, 1452 bp, Homo sapiens; identical to SEQ ID NO: 306

SEQ ID NO: 788 - DNA, 582 bp, Homo sapiens; identical to SEQ ID NO: 490

SEQ ID NO: 789 - DNA, 763 bp, Homo sapiens
acacaataaatatttttatttttaaacactgaattgtacatctttcatataaaacatgagattctagcctgttttaaaaaataagtatacttgctagtactatcttcactctttttttttttcagaagccaatgttctctaaatctgcagcttcattccacagctttacagaatcataatctcttgaatatatttccaatgttattaaaaaataaaaaatcatacaagatatatttagcacattaaaacttaagaggttacagtataactgtccagacctccaggtaccactgaatacttttccagtacaaagaggccaatatgttagaataattaattctctgtatttacttttattaaaaagaggtttttggtagtaagaacaaataatctctcatttgttgcctgaaatcctaaaataggatcattggtttctaggcttgctacttgctgcttagcaacctgtcctacttgcctgccttcctttctgttgtaaagtacagtggacatgggagcaggctgacgatagatgaatactcgacgaaggcactcacaaagggctgcatacgagtaatttggagcacaggcaaaaaatgttttgtctctctttgatgcttggacatagcctaaagcattgaaagttggatgtgctcccacatatcatcttgtttgctggagtgtggttgcagagtagggcatcaacatcatggcgcaaacagagcagggcatttcctttagatccactatgacagaggaaaggtac

SEQ ID NO: 790 - DNA, 445 bp, Homo sapiens
ttttggcagtgcaggggaagttcacagagccatttattgagccccacaaccgaccagagggaagggcgtccaccaggctcaggccatggtccttgaggggccggcgctctctacttggcccacatgtgtcctgaggagttgtggcatgcccgctgccctggtcagagctggccgccatcttccagctgcatctgccgggccagcgtctgcccgatggccaccagggggcttggctctgtaggccggactggccagcagctcctgaaaccgggtcctttcttcctcgagaagctgctgtctctgggctgcgctcatccggctgagctctgagggccggggcttgttgctctccctgctgcgggcttggcgccggctgccagcctcgagccccagcagctcgggcagggcatccctgagagggtgcaggtcccccaccaccaccgtg

SEQ ID NO: 791 - DNA, 542 bp, Homo sapiens
ttttttttttttaaagcactttgttttaatctttattctcttcaattagaaaaatacatactacaaaagtttcacattatagaaaacagaaaaaaacaaaaattcccccagaatcccaccctcagagatggttactcctctttggtaagtattcctccaggttttttaagcatatagtagtacataagcaggaaaaagtaaaatcctactatatataagcaactgctcttgagcaagttttcaaatggttctgacagatcattctgaccaatttctccagggaactttatggattagttttcagagaagattccatgacactgtgggtagacaaacctctaagatttttcttatcatttataataaatgttgtcccaagtgttaaatgtcaaagtttttaaaaatagtaaataaatgtgatacagaggaaaaaaagttcagaaaattatcccagtttcttatcaaaatcaaaactcctaagtcccaattccaacaagtaccataaaacgtctttaaaatgcgattttgagaaacaatcactt

SEQ ID NO: 792 - DNA, 544 bp, Homo sapiens
  misc_feature (1)..(544): n = a, t, g, or c
ccggtatccattggtagtttatttctttagggttctatcccaaccagtcgcttaaaaaccaagtaacacagacctgaggggtgggggctggggactgcacctccctcctactcatggtggacagcagtggggactagggaggggcaggagaggtggctgaagcaaggcagcagtaatggggccacgacgccacagagccagctccgtcctctcccagaccctggtgggagtccctgtggcttggggtggggagtgggggacccaacccaggcccctccctttcccttcctcagacagccttctttcgggctcaacccatttcttccggcaggagactgaggcacacagagaggaggaagtgggagaggaggacgagggaggggcagggtggcagcacaaatgaaggcagaggtgagaggcgtgggcaaggccactccacccccacacccaccccagagaggggcgaggaagccacaccatcacgcagcatgtcggngggacaaggcggggtttaaggctgaggggcccggggcaggcggngcct

SEQ ID NO: 793 - DNA, 551 bp, Homo sapiens
  misc_feature (1)..(551): n = a, t, g, or c
tccacatagcatggattctggagatgggtggctaatggtattggttcaacaactccacgaaggtaggggtcacgtcttggatccttttgccttaatctcagtgctcgttacttcatggtcccaagatggctgctgtatccccaagaatcatgtctgcgttcaaggaaggaggggtggaggaagaggaagggccaaactagctggacctgtcaccttctatcagaaagtaaaacctcgtcagaagtctgtttcctgctctctccctctgcatatcttcacttagatgcccttggcccgagccagctaccattgcacctctagctgcaaacaaagctaagacagcagggaacagaattgttcatggctgaatagaccaatcgtgttccatctactgaggactnggcacactgcctcctgcaataaaactggggatcccttaccaagngaggaatggcagaattgtgtaccagttaggntttgctgtgtaacaaacccttcccaaacntgggcaggtaggaacaaaccctgtattttnccacaatnctatgggg

SEQ ID NO: 794 - DNA, 467 bp, Homo sapiens
tcttaactcttgaagtataataaataatctttgctggcaggactatgctgaacctccttaggcactctctaattagatgtcctaggtcctcccaattcttagtccttttatatctgtttttctccttctcttattccatttagtttttcaattcatacaaaaccgtatccaggccatcaccaatcattctatacaacaaatgtttcttctaacgtccccactctaggttcccacgccgcccctaatcccgcttgaagcagccctgagaaacatcgcccattctctctccataccaccccccaaaaattttcgccgccccaacacttcaacactattttgttttatttttcttattaatataagaaggcaggaatgtcaggcctctgagcccaagccaagccatcgatcccctgtgacttgcacatatacgcccagatgggctgaagtaactgaagaatcacaaaaga

SEQ ID NO: 795 - DNA, 823 bp, Homo sapiens
  misc_feature (1)..(823): n = a, t, g, or c
ggacaaaacctggagcccaccngaggtggcnggccnccctagaactagtggatcccccggnctgcaggaattcggcacgagccgcgctggagtatccagataggcgacacgccggcgggcggctgaggcgggaatggctgctgtactgcagcgcgtcgagcggctgtccaatcgagtcgtgcgtgttttgggctgtaacccgggtcccatgaccctccaaggcaccaacacctacctagtggggaccggccccaggagaatcctcattgacactggagaaccagcaattccagattacatcagctgtttaaagcaggctctaactgattttaacacagcaatccagggaaattnntagttgacttcacttggcaaccgagnatncaattntngggagggcataaggagntnattttgnttaaaaaagnnattnaattaattgagcaatttaccttatttggtattnaaaaanaantttcncnacgngaattnntntaggngnngnaaggnaaatttatttgggggnaattgggaggtggnatcatttantntttattcnngaaaanttgggngttnnttaatttnanncntttnnggggnngccncttttaagnntgttccttttatanncccnttgggccaaaatttgnatgntnaacntgggttnttntttttttgnaggggtgaaatnntttttttttnntgngngntttncttnttntggggtngnnaccaacggtttttttnanggtnctttntgatnnttngnancttttnaaanggggtttttgnaattaaaggttgntttttttttnccggggnt

SEQ ID NO: 796 - DNA, 10211 bp, Homo sapiens; identical to SEQ ID NO: 6

SEQ ID NO: 797 - DNA, 572 bp, Homo sapiens
tttttttttttttgtttgataattttttaataaagggaggtttacatcactgatatttaagaatggctatatgcacaaaagaaaacacacctttttggttaaggggtgaggaagttagagaaagcatgagaaacagggagcatgtggggtgaggcggggcaggagtggaaggctgcaggcacccccagctcactccctgcctgcggcagcacccatgacactacagatcaaggggttatgaatgacatggattcagatttctttcattctagacttcaacctagccttaaccttttgtttcagcaccagtctaacagagcagcgcaggcgtttctcatccagcagcaatgctacttcctcacccagggcaggtgcatgggctgaccctgacgggagcctccaggaacactgccttgagaaggcaccaccgaggggctatgaggtccctgaagaccaactggtgcctgtgatctacaaacagacaaatatttgacctttgtcttcaatgacatttacatataaatagacataaataaaatcctccataatttactcttaggtctaggaagatg

SEQ ID NO: 798 - DNA, 495 bp, Homo sapiens
ttttttttttttttaacagaaaaaaatatatatatttcaaaggtaactagttttgttttactcaaactatttacaacaaggggcagagtagagacatgaatagctgcacaagttattttaattataaattaataaaagcctacattaaattcatcttattaactacttatgagagtgtataaaaactgatgaagccaacattatttggtacttctgatacttccattcgcttcaacttttctttctaaatagaaaattaaaagatggcaagccatttacaaaaagacatgtaattttgttaatcaggttgacattttgaacatcttcctcttcagttcagctgtcttctcatctatcttagcataggagtcctctgctgccttttcaataccgtcgtggtatttctccaaagcagttttcaagtttagaaatatttcctgggacttcagtttctccctttcagcagcatcttttagttgttgaattccaagttta

SEQ ID NO: 799 - DNA, 714 bp, Homo sapiens
actagtgattaatttaaatataattctgtaaatgtgtgtaggtctcactgtaacaactatttgttactataataaaactataatattgatgtcaggaatcaggaaaaaatttgagttggcttaaatcatctcagtccttatggcagttttattttcctgtagttggaactactaaaatttaggaaaatgctaagttcaagtttcgtaatgctttgaagtatttttatgctctgaatgtttaaatgttctcatcagtttcttgccatgttgttaactatacaacctggctaaagatgaatatttttctactggtattttaatttttgacctaaatgttcaagcattcggaatgagaaaactatacagatttgagaaatgatgctaaatttatagttttcagtaacttaaaaagctaacatgagagcatgccaaaatttgctaagtcttacaaagatcaagggctgtccgcaacagggaagaacagttttgaaaatttatgaactatcttatttttaggtaggttatgaaagctttttgtctaagtgaattcttatgccttggtcagagtaataactgaagcaggtgcttatcttggctttcgagtctgagtttaaaactacacattttgacatagtgtttattagcagccatctaaaaaggctctaaggtatatttaactaaaatactagctttgggaatcaaactgtttaacaa

SEQ ID NO: 800 - DNA, 770 bp, Homo sapiens
  misc_feature (1)..(770): n = a, t, g, or c
ctgacggactggccgagccggcggtgagaggccggcgcgtcgggagcgggccgcgcggcaccatgtcggccaaggtgcggctcaagaagctggagcagctgctcctggacgggccctggcgcaacgagagcgccctgagcgtggaaacgctgctcgacgtgctcgtctgcctgtacaccgagtgcagccactcggccctgcgccgcgacaagtacgtggccgagttcctcgagtgggctaaaccatttacacagctggtgaaagaaatgcagcttcatcgagaagactntgaaataattaaagtaattggaagaggtgcttttggtgaggttgctgttgtcaaaatgaagaatactgaacgaatttatgcaatgaaaatcctcaacaagtgggagatgctgaaaagagcagagaccgcgtgcttccgagaggagcgcgatgtgctggtgaacggcgactgccagtggatcaccgcgctgcactacgcctttcaggacgagaaccacctgtacttagtcatggattactatgtgggtggtgatttactgaccctgctcagcanatttgaagacaagcttccggaagatatggcgaggttctacattggtgaaatggtgctggccattgactccatccatcagcttcattacgtgcacagagacattannacctgacatgtccttnntgacgtgaatggtcatatccgnctggctgactttggatcatgtttgaagatgaatgatgatggcactgtgcagtnctccgtggcg

SEQ ID NO: 801 - DNA, 642 bp, Homo sapiens
  misc_feature (1)..(642): n = a, t, g, or c
gagaattcttctgtantttgattgcactcaacatttaatagaagacatttacattatttttagaaaatccaccgatgttgcacaatggcacatatttgtaaagacaaggctcattaattcagatatttggaattcaaaaatatttaaagttaaccacagcataatgaatcctcaacgtccagagttctacaaaaatccagcaaaacttacttttgctcattcatcagttctatgtcactccttagtttccctaaaaaaatatggctttataaaaagtagcttctataattcacaaaatgaagagttttattataatttgagtatcatctgtgtatcaccgacagcacagctttagaaaattattgcttttcttattatcttattatttcaggtttcattacacatcgagtacccatgcaggactcactacattgtataantaactatgatcntatagtgataaaaatatnagaagtatcttttgaattttaatcctaaaagcagggggaaaaaagtcaccttatctttaatggttaacaaaatcaagagctacccctaatataattgatcaaaccacttcttatgggctttgtttatagtttgttcatgggtccttttcaaaatgatggtgggtagcttacc

SEQ ID NO: 802 - DNA, 1369 bp, Homo sapiens
ggccgacagtgcctgatttgagatggggtcccaggtctcggtggaatcgggagctctgcacgtggtgattgtgggtgggggctttggcgggatcgcagcagccagccagctgcaggccctgaacgtccccttcatgctggtggacatgaaggactccttccaccacaatgtggctgctctccgagcctccgtggagacagggttcgccaaaaagacattcatttcttactcggtgactttcaaggacaacttccggcaggggctagtagtggggatagacctgaagaaccagatggtgctgctgcagggtggcgaggccctgcccttctctcatcttatcctggccacgggcagcactgggcccttcccgggcaagtttaatgaggtttccagccagcaggccgctatccaggcctatgaggacatggtgaggcaggtccagcgctcacggttcatcgtggtggtgggaggaggctcggctggagtggagatggcagcagagattaaaacagaatatcctgagaaagaggtcactctcattcactcccaagtggccctggctgacaaggagctcctgccctccgtccggcaggaagtgaaggagatcctcctccggaagggcgtgcagctgctgctgagtgagcgggtgagcaatctggaggagctgcctctcaatgagtatcgagagtacatcaaagtgcagacggacaaaggcacagaggtggccaccaacctggtgattctctgcaccggcatcaagatcaacagctccgcctaccgcaaagcatttgagagcagactagccagcagtggtgctctgagagtgaacgagcacctccaggtggagggccacagcaacgtctacgccattggtgactgtgccgacgtgaggacgcccaagatggcctatcttgccggcctccacgccaacatcgccgtggccaacatcgtcaactctgtgaagcagcggcctctccaggcctacaagccgggtgcactgacgttcctcctgtccatggggagaaatgacggtgtgggccaaatcagtggcttctatgtgggccggctcatggttcggctgaccaagagccgggacctgttcgtctctacgagctggaaaaccatgaggcagtctccaccttgatggagaggccaggcgggagaactaccgcagcaggtgggcgtacggactgcttggcgcatggcacccgcctggcaagtgctagaactaatgctattcttctggaataagatgccaatgatgtggtggctagaaatgcaacttgtataaaacaaaaatgggagagagagaggtattaaacaaataccccccttagaggataaaaaaaaaaaaaaaaaaaaaaaaaaa

SEQ ID NO: 803 - DNA, 518 bp, Homo sapiens; identical to SEQ ID NO: 448
  misc_feature (1)..(518): n = a, t, g, or c

SEQ ID NO: 804 - DNA, 2828 bp, Homo sapiens; identical to SEQ ID NO: 84

SEQ ID NO: 805 - DNA, 1172 bp, Homo sapiens
gccgggaagcagttgctgtggtacctgctgctgcccgagcggacgtagagcatcggacgcggccgccgtggcgctgggcaggagggcgaagccatgacgtcagtcagagaaaatattctctttggaatgggaaatcctctgcttgacatctctgctgtagtggacaaagatttccttgataagtattctctgaaaccaaatgaccaaatcttggctgaagacaaacacaaggaactgtttgatgaacttgtgaaaaaattcaaagtcgaatatcatgctggtggctctacccagaattcaattaaagtggctcagtggatgattcaacagccacacaaagcagcaacattttttggatgcattgggatagataaatttggggagatcctgaagagaaaagctgctgaagcccatgtggatgctcattactacgagcagaatgagcagccaacaggaacttgtgctgcatgcatcactggtgacaacaggtccctcatagctaatcttgctgctgccaattgttataaaaaggaaaaacatcttgatctggagaaaaactggatgttggtagaaaaagcaagagtttgttatatagcaggcttttttcttacagtttccccagagtcagtattaaaggtggctcaccatgcttctgaaaacaacaggattttcactttgaatctatctgcaccgtttattagccagttctacaaggaatcattgatgaaagttatgccttatgttgatatactttttggaaatgagacagaagctgccacttttgctagagagcaaggctttgagactaaagacattaaagagatagccaaaaagacacaagccctgccaaagatgaactcaaagaggcagcgaatcgtgatcttcacccaagggagagatgacactataatggctacagaaagtgaagtcactgcttttgctgtcttggatcaagaccagaaagaaattattgataccaatggagctggagatgcatttgttggaggttttctgtctcaactggtctctgacaagcctctgactgaatgtatccgtgctggccactatgcagcaagcatcataattagacggactggctgcacctttcctgagaagccagacttccactgatggaagagctgaaaacacaagcccaggagtgcagacacccc

SEQ ID NO: 806 - protein, 268 aa, Homo sapiens
GVRLPPHRLAPPLATCPARRAGAVPVRRPVYAGSFSQSFFVLRCEKRWDSSIKATSGKSVCRTDASRLTHRERLLRPAEKRGALTRARSSHSSVGLGGWRAGGGGRACAGSGRSCGTRRADCACALVAWLRRGRGHRAAPEVGRWLPPVPGQRPGVSPTHPLLSLRSAQRPGQGGAARPPRGAGCPPTRKGDARAPRPQAPPCAFAAPGPPRPTLAPALLSSRGGAAYSVRSPGRQPHRGAGVPALAECTSVASGPGRSGGQSDPAEG

SEQ ID NO: 807 - protein, 128 aa, Homo sapiens
MVGQEAALSLGAAMLEAPGPSDGCELSNPSASRVSCAGQMLEVQPGLYFGGAAAVAEPDHLREAGITAVLTVDSEEPSFKAGPGVEDLWRLFVPALDKPETDLLSHLDRCVAFIGQARVMQESVEVWP

SEQ ID NO: 808 - protein, 121 aa, Homo sapiens
MVGQEAALSLGAAMLEAPGPSDGCELSNPSASRVSCAGQMLEVQPGLYFGGAAAVAEPDHLREAGITAVLTVDSEEPSFKAGPGVEDLWRLFVPALDKPETDLLSHLDRVLLCHPGYSVVA

SEQ ID NO: 809 - protein, 312 aa, Homo sapiens [sequence omitted]

SEQ ID NO: 810 - protein, 163 aa, Homo sapiens
MVGQEAALSLGAAMLEAPGPSDGCELSNPSASRVSCAGQMLEVQPGLYFGGAAAVAEPDHLREAGITAVLTVDSEEPSFKAGPGVEDLWRLFVPALDKPETDLLSHLDRCVAFIGQARAEGRAVLVHCHAGVSRSVAIITAFLMKTDQLPSTGMVNSALVVGG

SEQ ID NO: 811 - protein, 340 aa, Homo sapiens
MLEAPGPSDGCELSNPSASRVSCAGQMLEVQPGLYFGGAAAVAEPDHLREAGITAVLTVDSEEPSFKAGPGVEDLWRLFVPALDKPETDLLSHLDRCVAFIGQARAEGRAVLVHCHAGVSRSVAIITAFLMKTDQLPFEKAYEKLQILKPEAKMNEGFEWQLKLYQAMGYEVDTSSAIYKQYRLQKVTEKYPELQNLPQELFAVDPTTVSQGLKDEVLYKCRKCRRSLFRSSSILDHREGSGPIAFAHKRMTPSSMLTTGRQAQCTSYFIEPVQWMESALLGVMDGQLLCPKCSAKLGSFNWYGEQCSCGRWITPAFQIHKNRVDEMKILPVLGSQTGKI

SEQ ID NO: 812 - protein, 268 aa, Homo sapiens; identical to SEQ ID NO: 806

SEQ ID NO: 813 - protein, 268 aa, Homo sapiens; identical to SEQ ID NO: 806

SEQ ID NO: 814 - protein, 268 aa, Homo sapiens; identical to SEQ ID NO: 806

SEQ ID NO: 815 - protein, 107 aa, Homo sapiens
VSSVHEGAAVYRVFKRWRAVNLHWDVLNYDKATDIEESSRGESSTSRTLWLPLTALRNRNLVHPTQLTSPRFQCGYVLLHLFNRMRPHEDLSEDNSSGEVVMRVTSV

SEQ ID NO: 816 - protein, 67 aa, Homo sapiens
MNPVPQMEMQKSPVFCVAHAGSCRPELFLFGHLGSSLRYPSESLGNKPKASKKSKVSGESSRISKLN

SEQ ID NO: 817 - protein, 197 aa, Homo sapiens [sequence omitted]

SEQ ID NO: 818 - protein, 390 aa, Homo sapiens
MDSYSAPESTPSASSRPEDYFIGATPLQKRLESVRKQSSFILTPPRRKIPQCSQLQEDVDPQKVAFLLHKQWTLYSLTPLYKFSYSNLKEYSRLLNAFIVAEKQKGLAVEVGEDFNIKVIFSTLLGMKGTQRDPEAFLVQGLILSPRLEYSGTILVDCNLCLLGSSDPSTLAFQVAGTAGACHHTRIVSKSQLPSENREGKVLWTGWFCCVFGDSLLETVSEDFTCLPLFLANGAESNTAIIGTWFQKTFDCYFSPLAINAFNLSWMAAMWTACKMDHYVATTEFLWSVPCSPQSLDISFAIHPEDAKALWDSVHKTPGEVTQEEVDLFMDCLYSHFHRHFKIHLSATRLVRVSTSVASAHTDGKIKILCHKYLIGVLAYLTELAIFQIE

SEQ ID NO: 819 - protein, 70 aa, Homo sapiens
LKRRRRAEFPFLNGLISELGWSLTGSAGEGRVGTHCPFALPPPRAEADSAGARVAELGDFSLHIVLEPDF

SEQ ID NO: 820 - protein, 344 aa, Homo sapiens
MDSYSAPESTPSASSRPEDYFIGATPLQKRLESVRKQSSFILTPPRRKIPQCSQLQEDVDPQKVAFLLHKQWTLYSLTPLYKFSYSNLKEYSRLLNAFIVAEKQKGLAVEVGEDFNIKVIFSTLLGMKGTQRDPEAFLVQIVSKSQLPSENREGKVLWTGWFCCVFGDSLLETVSEDFTCLPLFLANGAESNTAIIGTWFQKTFDCYFSPLAINAFNLSWMAAMWTACKMDHYVATTEFLWSVPCSPQSLDISFAIHPEDAKALWDSVHKTPGEVTQEEVDLFMDCLYSHFHRHFKIHLSATRLVRVSTSVASAHTDGKIKILCHKYLIGVLAYLTELAIFQIE

SEQ ID NO: 821 - protein, 328 aa, Homo sapiens
MDSYSAPESTPSASSRPEDYFIGATPLQKRLESVRKQSSFILTPPRRKIPQCSQLQEDVDPQKVAFLLHKQWTLYSLTPLYKFSYSNLKEYSRLLNAFIVAEKQKGLAVEVGEDFNIKVIFSTLLGMKGTQRDPEAFLVQIVSKSQLPSENREGKVLWTGWFCCVFGDSLLETVSEDFTCLPLFLANGAESNTAIIGTWFQKTFDCYFSPLAINAFNLSWMAAMWTACKMDHYVATTEFLWSVPCSPQSLDISFAIHPEDAKALWDSVHKTPGEVTQEEVDLFMDCLYSHFHRHFKIHLSATRLVRVSTSVASAHTDGKIKIQCHKKK

SEQ ID NO: 822 - protein, 163 aa, Homo sapiens
MDSYSAPESTPSASSRPEDYFIGATPLQKRLESVRKQSSFILTPPRRKIPQCSQLQEDVDPQKVAFLLHKQWTLYSLTPLYKFSYSNLKEYSRLLNAFIVAEKQKGLAVEVGEDFNIKVIFSTLLGMKGTQRDPEAFLVQILCHKYLIGVLAYLTELAIFQIE

SEQ ID NO: 823 - protein, 202 aa, Homo sapiens
MKGTQRDPEAFLVQIVSKSQLPSENREGKVLWTGWFCCVFGDSLLETVSEDFTCLPLFLANGAESNTAIIGTWFQKTFDCYFSPLAINAFNLSWMAAMWTACKMDHYVATTEFLWSVPCSPQSLDISFAIHPEDAKALWDSVHKTPGEVTQEEVDLFMDCLYSHFHRHFKIHLSATRLVRVSTSVASAHTDGKIKIQCHKKK

SEQ ID NO: 824 - protein, 353 aa, Homo sapiens
MGSGSSRSGNWAQVPAAALNPARAVIGRRPRAAAEAGDPKEAGAGCMGRRRQRVDPAAGARAGALPEAIAALSRSLPSGPSPEIFRRAKFDRPEATSALWQLLFRVLSPLPAGNALASLALEVQARLVKSALCSQGYPRLALAQLPEDGSQGSRELLLALSWLLARGPVPEQMLAQARVPLGDEMTVCQCEALASPGPPAPHMEAEGPVDVRHVQWLMGKLRFRWRQLVSSQQEQCALLSKIHLYTRGCHSDQSLSHLSVTEAEMLRDPEGGQQLLRTLERENQRLEAVLAWRRSELVFWRWMDTVLGTCAPEVPGFNPSRPNFSGPGEPPAPGGVPYLYMVRSSGRTGGLPP

SEQ ID NO: 825 - protein, 416 aa, Homo sapiens
MSSEPGGSSVPGRQGLAVHWLGAALHCRKDRWAVASAPHQGALLIALAREPGRRQGRAARAGRELGVGPGVGAGSSCPSDCLSMGSRVRFRPAAVCLPLLRTLERENQRLEAVLAWRRSELVFWRWMVRKPAHPSPGIPSHSSPQVGHSGSSCFPDRKRGFEGGHRPSVGSFQDFHSPSGEAHCCPRPQLHGLLECGLCASLDVTVAEMVASSPLWDLGDSTALFALCPSVPLAWCTLSHLGLCRWMDTVLGTCAPEVPAAASQPTFLPWVPERGGGELDLVVRELQALEEELREAAERRRAAWEAKAGGCGRGPEWSAARRASREAVEKELGALQQCWERDGGPAQPHGPHRLVRREDGAAGDRDLRAAVVIRTLRSQEACLEAVLRRLQGQCRQELARLVGARPGLIWIPPPGR

SEQ ID NO: 826 - protein, 249 aa, Homo sapiens
MGSGSSRSGNWAQVPAAALNPARAVIGRRPRAAAEAGDPKEAGAGCMGRRRQRVDPAAGARAGALPEAIAALSRSLPSGPSPEIFRRAKFDRPEATSALWQLLFRVLSPLPAGNALASLALEVQARLVKSALCSQGYPRLALAQLPEDGSQGSRELLLALSWLLARGPVPEQMLAQARVPLGDEMTVCQCEALASPGPPAPHMEAEGPVDVRHVQWLMGKLRFRWRQLVSSQQEQCALLNQAAAGLWER

SEQ ID NO: 827 - protein, 510 aa, Homo sapiens
  misc_feature (1)..(510): X = any amino acid
DSPPRPPASRRGGNGXEIQKASTPRPSPSPQVPAAALNPARAVIGRRPRAAAEAGDPKEAGAGCMGRRRQRVDPAAGARAGALPEAIAALSRSLPSGPSPEIFRRAKFDRPEATSALWQLLFRVLSPLPAGNALASLALEVQARLVKSALCSQGYPRLALAQLPEDGSQGSRELLLALSWLLARGPVPEQMLAQARVPLGDEMTVCPNSPCNTPRAGPPRTTAPHAIPHSILQPPTLSMRSPSPRMPPPIGLAPASCALEPIPTSPEKWPLFARRLCALRNSDVPNPPLRQPLHLFAPTLAAYLRHNALLPRNLAPSTKQLPAAIICAQQYNPSETRSLRSAATQFRHLTPTTLYPTMCAFTRTNAIPMHIPLHSASPVHADGYFRLSDTXHVILLLIPEASASXLPLHYIHYLCISPACAPPHRDDQNSYFRPHRYNYTPPPDARSRSRVTTPPAAPHSLXNRHFSPPRPYPYRQTTYITQAPTRCQISTVRSTPKPFXTIRSDVRRAH

SEQ ID NO: 828 - protein, 490 aa, Homo sapiens
  misc_feature (1)..(490): X = any amino acid
LGGDSGTRVQGGLSFPLPPSSQPREVQGHRGNSPGDTLPGVFTNARRRRWPEASPTFHPRRQPHVPPGPRLSGPPVQARADKRRRGGRGSREAPPRLPSSPPSPLSAVPPIATREPPPSQLFLLDLFFLRSSPFDIPRLHYNLTAVPARRSPPLERESSDSLARAPKMPITTAPPPIASPYSFAVISSLFPFSILAVQRRRRTFSQQRRCSSSTPAPPTPAPPPEPDPHAFSLPPPRMRGPALLFQLIQLPMRALSTLDRTIPNSTLLRVSHAQRLPCILTYEVQSYSLVSVCTSPVYILRQSLQLLSQLTYTNNTILLPRLGIVRSLMRASSAYVHGSYDSYVSVSTNIPAVYLIVTSTYKATHAPFSLPRDYHMRIATDPLSRLLYFLQPMLIAFVSSATSTAYSCVRSPPLQRRVTIHIISIYMKXSSCIRGVTRLRLRPYVSSACLSEEASLDLIHIYPSDRPYSHNLLXNIVARPTSEYTLRFAN

SEQ ID NO: 829 - protein, 173 aa, Homo sapiens
LGGDSGTRVQGGLSFPLPPSSQPREVQGHRGNSPGDTLPGVFTNARRRRWPEASPTFHPRRQPHVPPGPRLSGPPVQAGPAQRRPGSSCFHAPASSGAAPWRRQRETMSPASQKPPPPRRDHPAPSNLVAPHTLEHPKNNAHAITAIYASRPRALLPLSPILMPPSRLTPPPT

SEQ ID NO: 830 - protein, 354 aa, Homo sapiens
LGGDSGTRVQGGLSFPLPPSSQPREVQGHRGNSPGDTLPGVFTNARRRRWPEASPTFHPRRQPHVPPGPRLSGPPVQAGPAQRRPGSSCFHAPASSGAAPWRRQREALPRAGEDRERLRRLPRAPAARSGRGSCPGLRARGQGPAALGSALCGAAGSGRLLAAQPGRRRDGARLVRSTALPGARKWVRTRQNRLHSNSRGTVHWAWTRRRDPADAVIGCMSGQRGDWTSALWQLLFRVLSPLPAGNALASLALEGPARLGEAQHYGSPGLPRGLGTGTNFPEEGFPRDNRQTGFVGPLAVGNWGPREPGCPNPKGRAPGSPKWRFVGGDKKTSRGDKKRGGATSPPSPWAPSRV

SEQ ID NO: 831 - protein, 472 aa, Homo sapiens
MGSGSSRSGNWAQVPAAALNPARAVIGRRPRAAAEAGDPKEAGAGCMGRRRQRVDPAAGARAGALPEAIAALSRSLPSGPSPEIFRRAKFDRPEATSALWQLLFRVLSPLPAGNALASLALEVQARLVKSALCSQGYPRLALAQLPEDGSQGSRELLLALSWLLARGPVPEQMLAQARVPLGDEMTVCQCEALASPGPPAPHMEAEGPVDVRHVQWLMGKLRFRWRQLVSSQQEQCALLSKIHLYTRGCHSDQSLSHLSVTEAEMLRDPEGGQQLLRTLERENQRLEAVLAWRRSELVFWRWMDTVLGTCAPEVPAAASQPTFLPWVPERGGGELDLVVRELQALEEELREAAERRRAAWEAKAGGCGRGPEWSAARRASREAVEKELGALQQCWERDGGPAQPHGPHRLVRREDGAAGDRDLRAAVVIRTLRSQEACLEAVLRRLQGQCRQELARLVGARPGLIWIPPPGR

SEQ ID NO: 832 - protein, 518 aa, Homo sapiens [sequence omitted]

SEQ ID NO: 833 - protein, 363 aa, Homo sapiens
MGSGSSRSGNWAQVPAAALNPARAVIGRRPRAAAEAGDPKEAGAGCMGRRRQRVDPAAGARAGALPEAIAALSRSLPSGPSPEIFRRAKFDRPEATSALWQLLFRVLSPLPAGNALASLALEVQARLVKSALCSQGYPRLALAQLPEDGSQGSRELLLALSWLLARGPVPEQMLAQARVPLGDEMTVCQCEALASPGPPAPHMEAEGPVDVRHVQWLMGKLRFRWRQLVSSQQEQCALLSKIHLYTRGCHSDQSLSHLSVTEAEMLRDPEGGQQLLRTLERENQRLEAVLAWRRSELVFWRWMDTVLGTCAPEVPAAASQPTFLPWVPERGGGELDLVVRPLHPSAMGRHRCVWASRLHQGGS

SEQ ID NO: 834 - protein, 366 aa, Homo sapiens
MGSGSSRSGNWAQVPAAALNPARAVIGRRPRAAAEAGDPKEAGAGCMGRRRQRVDPAAGARAGALPEAIAALSRSLPSGPSPEIFRRAKFDRPEATSALWQLLFRVLSPLPAGNALASLALEVQARLVKSALCSQGYPRLALAQLPEDGSQGSRELLLALSWLLARGPVPEQMLAQARVPLGDEMTVCQCEALASPGPPAPHMEAEGPVDVRHVQWLMGKLRFRWRQLVSSQQEQCALLSKIHLYTRGCHSDQSLSHLSVTEAEMLRDPEGGQQLLRTLERENQRLEAVLAWRRSELVFWRWMDTVLGTCAPEVPAAASQPTFLPWVPERGGGELDLVVRRCGPCETLGGVRHGPALWPRCGGAGP

SEQ ID NO: 835 - protein, 425 aa, Homo sapiens
MGSGSSRSGNWAQVPAAALNPARAVIGRRPRAAAEAGDPKEAGAGCMGRRRQRVDPAAGARAGALPEAIAALSRSLPSGPSPEIFRRAKFDRPEATSALWQLLFRVLSPLPAGNALASLALEVQARLVKSALCSQGYPRLALAQLPEDGSQGSRELLLALSWLLARGPVPEQMLAQARVPLGDEMTVCQCEALASPGPPAPHMEAEGPVDVRHVQWLMGKLRFRWRQLVSSQQEQCALLSKIHLYTRGCHSDQSLSHLSVTEAEMLRDPEGGQQLLRTLERENQRLEAVLAWRRSELVFWRWMDTVLGTCAPEVPAAASQPTFLPWVPERGGGELDLVVRELQALEEELREAAERRRAAWEAKAGGCGRGPEWSAARRASREAVEKELGALQQCWEQKGAGNPGTGVTKIGGPPRAVYTKPGRRG

SEQ ID NO: 836 - protein, 466 aa, Homo sapiens
LNKAQSCSAISPTPPAKFCGAAVPHLLLPSPWLPPPCSSAALPGARKWVRTRQNRLHSNSRGTVHWAWTRRRDPADAVIGCMSGQRGDWTSALWQLLFRVLSPLPAGNALASLALEVQARLVKSALCSQGYPRLALAQLPEDGSQGSRELLLALSWLLARGPVPEQMLAQARVPLGDEMTVCQCEALASPGPPAPHMEAEGPVDVRHVQWLMGKLRFRWRQLVSSQQEQCALLSKIHLYTRGCHSDQSLSHLSVTEAEMLRDPEGGQQLLRTLERENQRLEAVLAWRRSELVFWRWMDTVLGTCAPEVPAAASQPTFLPWVPERGGGELDLVVRELQALEEELREAAERRRAAWEAKAGGCGRGPEWSAARRASREAVEKELGALQQCWERDGGPAQPHGPHRLVRREDGAAGDRDLRAAVVIRTLRSQEACLEAVLRRLQGQCRQELARLVGARPGLIWIPPPGR

SEQ ID NO: 837 - protein, 604 aa, Homo sapiens [sequence omitted]

SEQ ID NO: 838 - protein, 464 aa, Homo sapiens
TEGVRGGRGGACWGGGPEAGPGEAAWKRRSGAKEAEKKALPGARKWVRTRQNRLHSNSRGTVHWAWTRRRDPADAVIGCMSGQRGDWTSALWQLLFRVLSPLPAGNALASLALEVQARLVKSALCSQGYPRLALAQLPEDGSQGSRELLLALSWLLARGPVPEQMLAQARVPLGDEMTVCQCEALASPGPPAPHMEAEGPVDVRHVQWLMGKLRFRWRQLVSSQQEQCALLSKIHLYTRGCHSDQSLSHLSVTEAEMLRDPEGGQQLLRTLERENQRLEAVLAWRRSELVFWRWMDTVLGTCAPEVPAAASQPTFLPWVPERGGGELDLVVRELQALEEELREAAERRRAAWEAKAGGCGRGPEWSAARRASREAVEKELGALQQCWERDGGPAQPHGPHRLVRREDGAAGDRDLRAAVVIRTLRSQEACLEAVLRRLQGQCRQELARLVGARPGLIWIPPPGR

SEQ ID NO: 839 - protein, 385 aa, Homo sapiens [sequence omitted]

SEQ ID NO: 840 - protein, 505 aa, Homo sapiens
MGSGSSRSGNWAQVPAAALNPARAVIGRRPRAAAEAGDPKEAGAGCMGRRRQRVDPAAGARAGALPEAIAALSRSLPSGPSPEIFRRAKFDRPEAVTLSGGQAGRVGSRALAGSWAGSADLPAFYFPQTSALWQLLFRVLSPLPAGNALASLALEVQARLVKSALCSQGYPRLALAQLPEDGSQGSRELLLALSWLLARGPVPEQMLAQARVPLGDEMTVCQCEALASPGPPAPHMEAEGPVDVRHVQWLMGKLRFRWRQLVSSQQEQCALLSKIHLYTRGCHSDQSLSHLSVTEAEMLRDPEGGQQLLRTLERENQRLEAVLAWRRSELVFWRWMDTVLGTCAPEVPAAASQPTFLPWVPERGGGELDLVVRELQALEEELREAAERRRAAWEAKAGGCGRGPEWSAARRASREAVEKELGALQQCWERDGGPAQPHGPHRLVRREDGAAGDRDLRAAVVIRTLRSQEACLEAVLRRLQGQCRQELARLVGARPGLIWIPPPGR

SEQ ID NO: 841 - protein, 300 aa, Homo sapiens
MLAQARVPLGDEMTVCQCEALASPGPPAPHMEAEGPVDVRHVQWLMGKLRFRWRQLVSSQQEQCALLSKIHLYTRGCHSDQSLSHLSVTEAEMLRDPEGGQQLLRTLERENQRLEAVLAWRRSELVFWRWMDTVLGTCAPEVPAAASQPTFLPWVPERGGGELDLVVRELQALEEELREAAERRRAAWEAKAGGCGRGPEWSAARRASREAVEKELGALQQCWERDGGPAQPHGPHRLVRREDGAAGDRDLRAAVVIRTLRSQEACLEAVLRRLQGQCRQELARLVGARPGLIWIPPPGR

SEQ ID NO: 842 - protein, 592 aa, Homo sapiens [sequence omitted]

SEQ ID NO: 843 - protein, 569 aa, Homo sapiens
MGSGSSRSGNWAQVPAAALNPARAVIGRRPRAAAEAGDPKEAGAGCMGRRRQRVDPAAGARAGALPEAIAALSRSLPSGPSPEIFRRAKFDRPEATSALWQLLFRVLSPLPAGNALASLALEVQARLVKSALCSQGYPRLALAQLPEDGSQGSRELLLALSWLLARGPVPEQMLAQARVPLGDEMTVCQCEALASPGPPAPHMEAEGPVDVRHVQWLMGKLRFRWRQLVSSQQEQCALLSKIHLYTRGCHSDQSLSHLSVTEAEMLRDPEGGQQLLRTLERENQRLEAVLAWRRSELVFWRMNRPELCPDGGRSTIAGHGLNNIEYTDNECNATGETSSVSVVAPSVTPPTRNHNNARHYPTTRQNRSKQHNRQTRPRLQTTHNKEKNTTNQIRTTDTTDTHHHKRIQEQPATQEDKPDQSTTPPQNTHKQRERGRARTKRYTRSGVVTVAVADSAGRRVRTEKRHQSEEQDEGGTESDEGRAREQDGRSRAEKARGARRGREKAAAEERGPARGRHGAPAGRSTRRRPGSAVRTRRPETADRTDTLAQARGDQGRARHAEGPDPAGAP

SEQ ID NO: 844 - protein, 531 aa, Homo sapiens [sequence omitted]

SEQ ID NO: 845 - protein, 541 aa, Homo sapiens
MGSGSSRSGNWAQVPAAALNPARAVIGRRPRAAAEAGDPKEAGAGCMGRRRQRVDPAAGARAGALPEAIAALSRSLPSGPSPEIFRRAKFDRPEATSALWQLLFRVLSPLPAGNALASLALEVQARLVKSALCSQGYPRLALAQLPEDGSQGSRELLLALSWLLARGPVPEQMLAQARVPLGDEMTVCQCEALASPGPPAPHMEAEGPVDVRHVQWLMGKLRFRWRQLVSSQQEQCALLSKIHLYTRGCHSDQSLSHLSVTEAEMLRDPEGGQQVSGAGAAQNLDLAYPKCLHSFCTPGMGPRTFWNDLWLVCEQPGLLPGDWAAPLDPGGASACSLLSPFRALLRTLERENQRLEAVLAWRRSELVFWRWMDTVLGTCAPEVPAAASQPTFLPWVPERGGGELDLVVRELQALEEELREAAERRRAAWEAKAGGCGRGPEWSAARRASREAVEKELGALQQCWERDGGPAQPHGPHRLVRREDGAAGDRDLRAAVVIRTLRSQEACLEAVLRRLQGQCRQELARLVGARPGLIWIPPPGR

SEQ ID NO: 846 - protein, 533 aa, Homo sapiens
TEGVRGGRGGACWGGGPEAGPGEAAWKRRSGAKEAEKKALPGARKWVRTRQNRLHSNSRGTVHWAWTRRRDPADAVIGCMSGQRGDWTSALWQLLFRVLSPLPAGNALASLALEVQARLVKSALCSQGYPRLALAQLPEDGSQGSRELLLALSWLLARGPVPEQMLAQARVPLGDEMTVCQCEALASPGPPAPHMEAEGPVDVRHVQWLMGKLRFRWRQLVSSQQEQCALLSKIHLYTRGCHSDQSLSHLSVTEAEMLRDPEGGQQVSGAGAAQNLDLAYPKCLHSFCTPGMGPRTFWNDLWLVCEQPGLLPGDWAAPLDPGGASACSLLSPFRALLRTLERENQRLEAVLAWRRSELVFWRWMDTVLGTCAPEVPAAASQPTFLPWVPERGGGELDLVVRELQALEEELREAAERRRAAWEAKAGGCGRGPEWSAARRASREAVEKELGALQQCWERDGGPAQPHGPHRLVRREDGAAGDRDLRAAVVIRTLRSQEACLEAVLRRLQGQCRQELARLVGARPGLIWIPPPGR

SEQ ID NO: 847 - protein, 336 aa, Homo sapiens
MGSGSSRSGNWAQVPAAALNPARAVIGRRPRAAAEAGDPKEAGAGCMGRRRQRVDPAAGARAGALPEAIAALSRSLPSGPSPEIFRRAKFDRPEATSALWQLLFRVLSPLPAGNALASLALEVQARLVKSALCSQGYPRLALAQLPEDGSQGSRELLLALSWLLARGPVPEQMLAQARVPLGDEMTVCQCEALASPGPPAPHMEAEGPVDVRHVQWLMGKLRFRWRQLVSSQQEQCALLSKIHLYTRGCHSDQSLSHLSVTEAEMLRDPEGGQQLCGPGNVKTGLSAALGANRLCEIKPAPCRVLRSPPLRTKGDTIDPTKKEKRSNRAKSKPQMH

SEQ ID NO: 848 - protein, 303 aa, Homo sapiens
MGSGSSRSGNWAQVPAAALNPARAVIGRRPRAAAEAGDPKEAGAGCMGRRRQRVDPAAGARAGALPEAIAALSRSLPSGPSPEIFRRAKFDRPEATSALWQLLFRVLSPLPAGNALASLALEVQARLVKSALCSQGYPRLALAQLPEDGSQGSRELLLALSWLLARGPVPEQMLAQARVPLGDEMTVCQCEALASPGPPAPHMEAEGPVDVRHVQWLMGKLRFRWRQLVSSQQEQCALLSCCGLWSVRTSAWRLSWRGGALSWSSGGGWTRSWAPVPRRCLLQPHSPPSCPGSPSAGVASWTW

SEQ ID NO: 849 - protein, 249 aa, Homo sapiens
MLAQARVPLGDEMTVCRKIHLYTRGCHSDQSLSHLSVTEAEMLRDPEGGQQLLRTLERENQRLEAVLAWRRSELVFWRWMDTVLGTCAPEVPAAASQPTFLPWVPERGGGELDLVVRELQALEEELREAAERRRAAWEAKAGGCGRGPEWSAARRASREAVEKELGALQQCWERDGGPAQPHGPHRLVRREDGAAGDRDLRAAVVIRTLRSQEACLEAVLRRLQGQCRQELARLVGARPGLIWIPPPGR

SEQ ID NO: 850 - protein, 374 aa, Homo sapiens
MGTGLGSAVIGPPRSGSSSSVCSRHSLRATPWHRSPWGYPRLALAQLPEDGSQGSRELLLALSWLLARGPVPEQMLAQARVPLGDEMTVCQCEALASPGPPAPHMEAEGPVDVRHVQWLMGKLRFRWRQLVSSQQEQCALLSKIHLYTRGCHSDQSLSHLSVTEAEMLRDPEGGQQLLRTLERENQRLEAVLAWRRSELVFWRWMDTVLGTCAPEVPAAASQPTFLPWVPERGGGELDLVVRELQALEEELREAAERRRAAWEAKAGGCGRGPEWSAARRASREAVEKELGALQQCWERDGGPAQPHGPHRLVRREDGAAGDRDLRAAVVIRTLRSQEACLEAVLRRLQGQCRQELARLVGARPGLIWIPPPGR

SEQ ID NO: 851 - protein, 421 aa, Homo sapiens
MGSGSSRSGNWAQVPAAALNPARAVIGRRPRAAAEAGDPKEAGAGCMGRRRQRVDPAAGARAGALPEAIAALSRSLPSGPSPEIFRRAKFDRPEATSALWQLLFRVLSPLPAGNALASLALEVQARLVKSALCSQGYPRLALAQLPEDGSQGSRELLLALSWLLARGPVPEQMLAQARVPLGDEMTVCRKIHLYTRGCHSDQSLSHLSVTEAEMLRDPEGGQQLLRTLERENQRLEAVLAWRRSELVFWRWMDTVLGTCAPEVPAAASQPTFLPWVPERGGGELDLVVRELQALEEELREAAERRRAAWEAKAGGCGRGPEWSAARRASREAVEKELGALQQCWERDGGPAQPHGPHRLVRREDGAAGDRDLRAAVVIRTLRSQEACLEAVLRRLQGQCRQELARLVGARPGLIWIPPPGR

SEQ ID NO: 852 - protein, 447 aa, Homo sapiens [sequence omitted]

SEQ ID NO: 853 - protein, 306 aa, Homo sapiens
  misc_feature (1)..(306): X = any amino acid
MGSGSSRSGNWAQVPAAALNPARAVIGRRPRAAAEAGDPKEAGAGCMGRRRQRVDPAAGARAGALPEAIAALSRSLPSGPSPEIFRRAKFDRPEATSALWQLLFRVLSPLPAGNALASLALTGGPXXPLEDSXSTKCSXQGYPRLALAQLPEDGSQGSRELLLALSWLLARGPVPEQMLAQARVPLGDEMTVCQCEALASPGPPAPHMEAEGPVDVRHVQWLMGKLRFRWRQLVSSQQEQCALLSKIHLYTRGCHSDQSLSHLSVTEAEMLRDPEGGQQLLRTLERENQRLEAVLAWRRSELVFWR

SEQ ID NO: 854 - protein, 163 aa, Homo sapiens
MLAQARVPLGDEMTVCRKIHLYTRGCHSDQSLSHLSVTEAEMLRDPEGGQQLLRTLERENQRLEAVLAWRRSELVFWRWMDTVLGTCAPEVPAAASQPTFLPWVPERGGGELDLVVRELQAWRKNCGKWDAGGLEGSEVDRGQGSPRGPRSGQGGPHVEKGPP

SEQ ID NO: 855 - DNA, 265 bp, Homo sapiens
cctcaagaggaggcagtcacagagggaagtagaggccaggcagcctgcgaatgatcaatgtggtacagggctcctgtcccctctatggccacctctcaagttgttctttcctaggttctttattaaatgtgatagatttatccaaaacagttatgaattcagatcctaccaatctgatattacaagagctcacataggggaaggaatggagtttaacagtaatgttgacaaagaaaaataaagtttttaataaaaggtatcaaca

SEQ ID NO: 856 - DNA, 2578 bp, Homo sapiens
ggcgtccgtctgccgcctcaccgcttggccccgcccctcgccacctgcccggccaggcgcgccggggccgtcccagtacgtcgccctgtttacgctggctctttctcccagtcttttttcgttttaagatgtgagaagagatgggattcttcaatcaaggccacaagcgggaaatcagtctgcaggaccgatgccagcaggctcacgcaccgagaacggctactccgcccagctgagaagcgcggggccctgacgcgggcgcgctcctcgcattcttccgttgggctgggaggctggagggcaggcggcggcggccgcgcatgcgccgggagcggccggagctgcgggacgcggagggccgactgcgcctgcgcgctggttgcctggttacggcgtggccgcgggcaccgagcggcgccggaagttggtcgatggctgccgccagtccctggccagcgtcctggggtttccccgacgcatcctctactgtcccttcgctctgcacagaggcccgggcagggaggggcggcccggccaccgcgcggagccgggtgtccgccgactcgcaagggggacgcgcgggctcctcgtccccaagctccgccctgcgcctttgctgcgccgggccctcccaggcccaccctggccccagccctgctgtcctcccggggaggtgcggcctactcggttcgttcccccggccgccagccccacaggggcgctggggtcccagccttggctgagtgcacgtcggtggcgagtgggcccgggcgctcgggcggccagagcgacccagcggaggggtgaggcgggtaggcgctcctgtgcctgccacggccaggccaggcagcatccacgccctcccgcggaagatcgcagggaacaggtgggcactatcctctgtgccctcatttttcggaggagccgagggaggctgagcggttgaggaagcggccagccatgccgggcccactcacctgcacacctgcctggcaagggcagggaagagccgcggccttcctctgctgctccttccagagggcaggcgccgtggtgggggtgcccgcccgatggcatcgcgggaggctgagctcccagcagcggctgaggtcctccctgggtgggagccacccttgtccccagctgggccggcggctggtgagggagggggtgatatccgtgccacgccagcagggccgcaggcggtgcagggagagcttcagtccggctgacgtggcaccagggccaatctgctcagctaacatttgcctttcaggagtcagattcctgacctgtttgaacagagttagggagcacgtggtagggcccagccccagccccgctgcccccatctgcttcttcccagtggtcgaggcgctctgcaccctccgcggaaggaggtgtcattgtttgccctttccaaagagggggatgcagaggtggatgctgcctctcaggcgtggggctcgccttttgccgctcgcgagttcaaagaacccaagagccaggagcccagggctcgaccctctagggtcctccgaaaccctgtggtcccaccggggtgggcactaagctatgggagagaccatagctgcagaaaccaaccctgccctaggcataaaatgcaaggtctctggacctcagggcagggatgttagacagcggcttctgttggctcctaggggtgtgaatcaccacatcacctgcagggggcgcggctgtctttcttccccctcttctccctaatcctgagtgcacggagacagctctcagcagtttgtagcctgatgtggagtggagggttcctgcaccctacacccgagcccatccagcctctgggccatagacccttccgttgaaggcccagcctgcccctgagacgctgtgtgccctttttcaacttccttagtctctgagcatcaggtcttcatctctaagatagagcaagatgagcacctaaacgtttcagggctgaaatggggttgccaggacaacaagcatggcaggggcgaatggggacatcaggtgactgactgcgagccagcagaggcctccacccagtgctgggaggtgtcccgccggtggtggccatcactattcctggtggggctttgctgcttttgcctgcagcatccgctggtttctccattctccaagtctctgcccctgctcacacctggaggctggacacaagtgtcaccacttccctgaacccccctaggtgggctggaatcagcatctggtgcaaagctctgtgaccactgctgtaccacattatgcagagcacacaggacaggctggtgcacctccaggctgtgccaggaaacccgctgcctttgcgtcaccacagccttggtcacagcgtgaccttggtgcctccgacgggtcagctcctcccattagccatgctgtccagcacgggggccgctggtgcttgctgtgagactgagctgggctctgagtgtaaactacatggtaggttgtgaaggatgcaaatatcgaatcaatcattttttattgcatattaaaatgacaatatcttggatgtatcagattaaacaaaatactatttaatttt

SEQ ID NO: 857 - DNA, 2762 bp, Homo sapiens
  misc_feature (1)..(2762): n = a, t, g, or c
tgggctttgttgggccccccgggtttgtccccttttacccctctttttggggggcccccgggggggcgccaaaaaaagagaaattgttttttaaaaaagagtttttttgaggggggcccagagggcggcccccacaaaggntttcggtttacgatcaccgtaatttattgggaacattcggccccgggttctaccggtgagggtgcgattgggggtggttgggggtgtccgggtttgcgcgctgggaggtaaagaaaggcaggtttattagataaagtatgaaaatacattgcaagggtgcaacaggcaggtcagcaagagagaagctgactgctaggaaacaaaggcttgctggggattttgtagaatggtgcttatgttgtgggtggaagagggctttgtgcagtactaataatgccagggttgcagtgaactaacttccatttttctatcagctgagggtctggtgatggctgggcacaggcagattgtgagttatttgcacagcagggctatgtgtcctggaccacgaagaaaggcagacttatggcttgtctgctttctccttttgcttcccttcgtccagccagcctgactccttttccctaattaggactccacacgcaagggtttgttctgttccagaatagagacaggtcgatgtatctatctttataccagtactatagctgctacttcttgaccaattacagctttagtatctctctcacctgtcctccctatacaaaagatatataaaatatactcactgtactgagtatcttcctgcagcattcagtctggagcaaagcctgcttccttcaaccctttccaaaatccccaaataaaagcccaaaatctgtagaggatcttcctaacatcctcgtgctgagatgccctgaaattctccataactcatgactgagtaataaaaccaacttgcttaattaaagttggtttcttgtagtcctggccggaggacattgacttacaaaaatataggattagtatcttcaaaataaatagacagtaaacatcaacaaggattcacaccccaataatgaaattgggcagaaaaaggaaaaataatcatgaaatgcacagtaaagatggctccataatattgaaaaaaattttacttcaaatgcataaaatgatgcttctgattcagctggtgcgacatttatttcacatttgagttcagctgctcctgatgtctctttcctgaaaatttcaatactaagagctcgagaaaccctgtatttggggaagcttatccttcaccatcaactttgggggtaggggtcagagggaacaagggtggaaaggccgcgctgaatggggccgaagctccgcccctcagcgataagtccagattcctgcggccgacgtggtcctccgagggagcagcagagccgccgaggctggcgagtcccaggggaaggatgttctagccggagtctactcgatggtagggcaggaagccgccttgtctctgggcgcggccatgttggaggctccgggcccgagtgatggctgcgagctcagcaaccccagcgccagcagagtcagctgtgccgggcagatgctggaagtgcagccaggattgtatttcggtggggccgcggccgtcgcggagccagatcacctgagggaagcgggcatcacggccgtgctaacagtggactcggaggagcccagcttcaaggcggggcctggggtcgaggatctatggcgcctcttcgtgccagcgctggacaaacccgagacggacctactcagccatctggaccggtgcgtggccttcatcggtcaggcccgcgctgagggccgtgcggtgttggtgcactgtcatgcaggagtcagtcgaagtgtggccataataactgcttttctcatgaagactgaccaacttccctttgaaaaagcctatgaaaagctccagattctcaaaccagaggctaagatgaatgaggggtttgagtggcaactgaaattataccaggcaatgggatacgaagtggatacctctagtgcaatttataagcaatatcgtttacaaaaggttacagagaagtatccagaattgcagaatttacctcaagaactctttgctgttgacccaactaccgtttcacaaggattgaaagatgaggttctctacaagtgtagaaagtgcaggcgatcattatttcgaagttctagtattctggatcaccgtgaaggaagtggacctatagcctttgcccacaagagaatgacaccatcttccatgcttaccacagggaggcaagctcaatgtacatcttatttcattgaacctgtacagtggatggaatctgctttgttgggagtgatggatggacagcttctttgcccaaaatgcagtgccaagttgggttccttcaactggtatggtgaacagtgctcttgtggtaggtggataacacctgcttttcaaatacataagaatagagtggatgaaatgaaaatattgcctgttttgggatcacaaacaggaaaaatatgaacatgatattttatagcttgggaagaaacttgcagatgatatgtgctgcctttgcttcttatcattcatggcagattgtttgtgctttcaacatttcatttgaaatgggagaagataaaatcacttgatgtaacctggaaactatgctttacatggcaatcaaagccttttgatcatgtacattttatttgatattaaaatcttttataaccagaaatactggcagtgtttc

SEQ ID NO: 858 - DNA, 2734 bp, Homo sapiens
  misc_feature (1)..(2734): n = a, t, g, or c
tgggctttgttgggccccccgggtttgtccccttttacccctctttttggggggcccccgggggggcgccaaaaaaagagaaattgttttttaaaaaagagtttttttgaggggggcccagagggcggcccccacaaaggntttcggtttacgatcaccgtaatttattgggaacattcggccccgggttctaccggtgagggtgcgattgggggtggttgggggtgtccgggtttgcgcgctgggaggtaaagaaaggcaggtttattagataaagtatgaaaatacattgcaagggtgcaacaggcaggtcagcaagagagaagctgactgctaggaaacaaaggcttgctggggattttgtagaatggtgcttatgttgtgggtggaagagggctttgtgcagtactaataatgccagggttgcagtgaactaacttccatttttctatcagctgagggtctggtgatggctgggcacaggcagattgtgagttatttgcacagcagggctatgtgtcctggaccacgaagaaaggcagacttatggcttgtctgctttctccttttgcttcccttcgtccagccagcctgactccttttccctaattaggactccacacgcaagggtttgttctgttccagaatagagacaggtcgatgtatctatctttataccagtactatagctgctacttcttgaccaattacagctttagtatctctctcacctgtcctccctatacaaaagatatataaaatatactcactgtactgagtatcttcctgcagcattcagtctggagcaaagcctgcttccttcaaccctttccaaaatccccaaataaaagcccaaaatctgtagaggatcttcctaacatcctcgtgctgagatgccctgaaattctccataactcatgactgagtaataaaaccaacttgcttaattaaagttggtttcttgtagtcctggccggaggacattgacttacaaaaatataggattagtatcttcaaaataaatagacagtaaacatcaacaaggattcacaccccaataatgaaattgggcagaaaaaggaaaaataatcatgaaatgcacagtaaagatggctccataatattgaaaaaaattttacttcaaatgcataaaatgatgcttctgattcagctggtgcgacatttatttcacatttgagttcagctgctcctgatgtctctttcctgaaaatttcaatactaagagctcgagaaaccctgtatttggggaagcttatccttcaccatcaactttgggggtaggggtcagagggaacaagggtggaaaggccgcgctgaatggggccgaagctccgcccctcagcgataagtccagattcctgcggccgacgtggtcctccgagggagcagcagagccgccgaggctggcgagtcccaggggaaggatgttctagccggagtctactcgatggtagggcaggaagccgccttgtctctgggcgcggccatgttggaggctccgggcccgagtgatggctgcgagctcagcaaccccagcgccagcagagtcagctgtgccgggcagatgctggaagtgcagccaggattgtatttcggtggggccgcggccgtcgcggagccagatcacctgagggaagcgggcatcacggccgtgctaacagtggactcggaggagcccagcttcaaggcggggcctggggtcgaggatctatggcgcctcttcgtgccagcgctggacaaacccgagacggacctactcagccatctggaccggtgcgtggccttcatcggtcaggcccgcgtcatgcaggagtcagtcgaagtgtggccataataactgcttttctcatgaagactgaccaacttccctttgaaaaagcctatgaaaagctccagattctcaaaccagaggctaagatgaatgaggggtttgagtggcaactgaaattataccaggcaatgggatacgaagtggatacctctagtgcaatttataagcaatatcgtttacaaaaggttacagagaagtatccagaattgcagaatttacctcaagaactctttgctgttgacccaactaccgtttcacaaggattgaaagatgaggttctctacaagtgtagaaagtgcaggcgatcattatttcgaagttctagtattctggatcaccgtgaaggaagtggacctatagcctttgcccacaagagaatgacaccatcttccatgcttaccacagggaggcaagctcaatgtacatcttatttcattgaacctgtacagtggatggaatctgctttgttgggagtgatggatggacagcttctttgcccaaaatgcagtgccaagttgggttccttcaactggtatggtgaacagtgctcttgtggtaggtggataacacctgcttttcaaatacataagaatagagtggatgaaatgaaaatattgcctgttttgggatcacaaacaggaaaaatatgaacatgatattttatagcttgggaagaaacttgcagatgatatgtgctgcctttgcttcttatcattcatggcagattgtttgtgctttcaacatttcatttgaaatgggagaagataaaatcacttgatgtaacctggaaactatgctttacatggcaatcaaagccttttgatcatgtacattttatttgatattaaaatcttttataaccagaaatactggcagtgtttc

SEQ ID NO: 859 - DNA, 2951 bp, Homo sapiens
  misc_feature (1)..(2951): n = a, t, g, or c
tgggctttgttgggccccccgggtttgtccccttttacccctctttttggggggcccccgggggggcgccaaaaaaagagaaattgttttttaaaaaagagtttttttgaggggggcccagagggcggcccccacaaaggntttcggtttacgatcaccgtaatttattgggaacattcggccccgggttctaccggtgagggtgcgattgggggtggttgggggtgtccgggtttgcgcgctgggaggtaaagaaaggcaggtttattagataaagtatgaaaatacattgcaagggtgcaacaggcaggtcagcaagagagaagctgactgctaggaaacaaaggcttgctggggattttgtagaatggtgcttatgttgtgggtggaagagggctttgtgcagtactaataatgccagggttgcagtgaactaacttccatttttctatcagctgagggtctggtgatggctgggcacaggcagattgtgagttatttgcacagcagggctatgtgtcctggaccacgaagaaaggcagacttatggcttgtctgctttctccttttgcttcccttcgtccagccagcctgactccttttccctaattaggactccacacgcaagggtttgttctgttccagaatagagacaggtcgatgtatctatctttataccagtactatagctgctacttcttgaccaattacagctttagtatctctctcacctgtcctccctatacaaaagatatataaaatatactcactgtactgagtatcttcctgcagcattcagtctggagcaaagcctgcttccttcaaccctttccaaaatccccaaataaaagcccaaaatctgtagaggatcttcctaacatcctcgtgctgagatgccctgaaattctccataactcatgactgagtaataaaaccaacttgcttaattaaagttggtttcttgtagtcctggccggaggacattgacttacaaaaatataggattagtatcttcaaaataaatagacagtaaacatcaacaaggattcacaccccaataatgaaattgggcagaaaaaggaaaaataatcatgaaatgcacagtaaagatggctccataatattgaaaaaaattttacttcaaatgcataaaatgatgcttctgattcagctggtgcgacatttatttcacatttgagttcagctgctcctgatgtctctttcctgaaaatttcaatactaagagctcgagaaaccctgtatttggggaagcttatccttcaccatcaactttgggggtaggggtcagagggaacaagggtggaaaggccgcgctgaatggggccgaagctccgcccctcagcgataagtccagattcctgcggccgacgtggtcctccgagggagcagcagagccgccgaggctggcgagtcccaggggaaggatgttctagccggagtctactcgatggtagggcaggaagccgccttgtctctgggcgcggccatgttggaggctccgggcccgagtgatggctgcgagctcagcaaccccagcgccagcagagtcagctgtgccgggcagatgctggaagtgcagccaggattgtatttcggtggggccgcggccgtcgcggagccagatcacctgagggaagcgggcatcacggccgtgctaacagtggactcggaggagcccagcttcaaggcggggcctggggtcgaggatctatggcgcctcttcgtgccagcgctggacaaacccgagacggacctactcagccatctggaccgggtcttgctctgtcacccaggctacagtgtagtagcgtaattacggctcactgcagtctcaacctcccaggctcaagtgaacctcctgcctcggcctccagagtagctgggactacagaccccaccacatccggctaattttttgtagaggtggggtctcactttgttgcccaggctggtctccaactcttggactcaaccaatcctctcacctcgcctcccaaagtgctgggatttcaggcgtagtcatgcaggagtcagtcgaagtgtggccataataactgcttttctcatgaagactgaccaacttccctttgaaaaagcctatgaaaagctccagattctcaaaccagaggctaagatgaatgaggggtttgagtggcaactgaaattataccaggcaatgggatacgaagtggatacctctagtgcaatttataagcaatatcgtttacaaaaggttacagagaagtatccagaattgcagaatttacctcaagaactctttgctgttgacccaactaccgtttcacaaggattgaaagatgaggttctctacaagtgtagaaagtgcaggcgatcattatttcgaagttctagtattctggatcaccgtgaaggaagtggacctatagcctttgcccacaagagaatgacaccatcttccatgcttaccacagggaggcaagctcaatgtacatcttatttcattgaacctgtacagtggatggaatctgctttgttgggagtgatggatggacagcttctttgcccaaaatgcagtgccaagttgggttccttcaactggtatggtgaacagtgctcttgtggtaggtggataacacctgcttttcaaatacataagaatagagtggatgaaatgaaaatattgcctgttttgggatcacaaacaggaaaaatatgaacatgatattttatagcttgggaagaaacttgcagatgatatgtgctgcctttgcttcttatcattcatggcagattgtttgtgctttcaacatttcatttgaaatgggagaagataaaatcacttgatgtaacctggaaactatgctttacatggcaatcaaagccttttgatcatgtacattttatttgatattaaaatcttttataaccagaaatactggcagtgtttc

SEQ ID NO: 860 - DNA, 3772 bp, Homo sapiens
  misc_feature (1)..(3772): n = a, t, g, or c
tgggctttgttgggccccccgggtttgtccccttttacccctctttttggggggcccccgggggggcgccaaaaaaagagaaattgttttttaaaaaagagtttttttgaggggggcccagagggcggcccccacaaaggntttcggtttacgatcaccgtaatttattgggaacattcggccccgggttctaccggtgagggtgcgattgggggtggttgggggtgtccgggtttgcgcgctgggaggtaaagaaaggcaggtttattagataaagtatgaaaatacattgcaagggtgcaacaggcaggtcagcaagagagaagctgactgctaggaaacaaaggcttgctggggattttgtagaatggtgcttatgttgtgggtggaagagggctttgtgcagtactaataatgccagggttgcagtgaactaacttccatttttctatcagctgagggtctggtgatggctgggcacaggcagattgtgagttatttgcacagcagggctatgtgtcctggaccacgaagaaaggcagacttatggcttgtctgctttctccttttgcttcccttcgtccagccagcctgactccttttccctaattaggactccacacgcaagggtttgttctgttccagaatagagacaggtcgatgtatctatctttataccagtactatagctgctacttcttgaccaattacagctttagtatctctctcacctgtcctccctatacaaaagatatataaaatatactcactgtactgagtatcttcctgcagcattcagtctggagcaaagcctgcttccttcaaccctttccaaaatccccaaataaaagcccaaaatctgtagaggatcttcctaacatcctcgtgctgagatgccctgaaattctccataactcatgactgagtaataaaaccaacttgcttaattaaagttggtttcttgtagtcctggccggaggacattgacttacaaaaatataggattagtatcttcaaaataaatagacagtaaacatcaacaaggattcacaccccaataatgaaattgggcagaaaaaggaaaaataatcatgaaatgcacagtaaagatggctccataatattgaaaaaaattttacttcaaatgcataaaatgatgcttctgattcagctggtgcgacatttatttcacatttgagttcagctgctcctgatgtctctttcctgaaaatttcaatactaagagctcgagaaaccctgtatttggggaagcttatccttcaccatcaactttgggggtaggggtcagagggaacaagggtggaaaggccgcgctgaatggggccgaagctccgcccctcagcgataagtccagattcctgcggccgacgtggtcctccgagggagcagcagagccgccgaggctggcgagtcccaggggaaggatgttctagccggagtctactcgatggtagggcaggaagccgccttgtctctgggcgcggccatgttggaggctccgggcccgagtgatggctgcgagctcagcaaccccagcgccagcagagtcagctgtgccgggcagatgctggaagtgcagccaggattgtatttcggtggggccgcggccgtcgcggagccagatcacctgagggaagcgggcatcacggccgtgctaacagtggactcggaggagcccagcttcaaggcggggcctggggtcgaggatctatggcgcctcttcgtgccagcgctggacaaacccgagacggacctactcagccatctggaccggtgcgtggccttcatcggtcaggcccgcgctgagggccgtgcggtgttggtgcactgtcatgcaggagtcagtcgaagtgtggccataataactgcttttctcatgaagactgaccaacttccctttgaaaaagcctatgaaaagctccagattctcaaaccagaggctaagatgaatgaggggtttgagtggcaactgaaattataccaggcaatgggatacgaagtggatacctctagtgcaatttataagcaatatcgtttacaaaaggttacagagaagtatccagaattgcagaatttacctcaagaactctttgctgttgacccaactaccgtttcacaaggattgaaagatgaggttctctacaagtgtagaaagtgcaggcgatcattatttcgaagttctagtattctggatcaccgtgaaggaagtggacctatagcctttgcccacaagagaatgacaccatcttccatgcttaccacagggaggcaagctcaatgtacatcttatttcattgaacctgtacagtggatggaatctgctttgttgggagtgatggatggacaggtgagaacacattttattttctacaattttattttatgatctatattttattccttcttgcattttaagctctattttaactagtgttttgctccatttcttaatttctttatttctgaagattatatctttctagtgtagataagactatcaaaaataaaatatttttcaaaaaccagctgatccaacatagtgaactacttctggttgagagccctggtctaagttaataaatttcctttaaggctatttatatttttttcaaatataagactaacatttatttttaaactaattagaatatattggctgggcactcttgcctcattagctcatgcccaaagtgctgggaattacaggtatgagccaccacactcagcctgcttctgagttttatgtctagttttctatagctcaagattaaaaataaaaactcttaccttataccatgcataaatcaaagagctaaacataaaaattaatgctataactaactacattagaagaaaatgcagttgccttattaggcttttttgatttacctattttcctggaatatcagtttgtctttaaatagctaagaatctgacttatatgctgtcaatacacacagttagtaatacagcatgaaaatcctaacatgcttttctatactttagccgtgatcattttcatttgaagtcctaaattacaaactgatttaaaagctatatatatatatatatatatatatatatatatatatgccacatccatgaaaccttccttaatcaaatctcaagcttcacttttctcccttcaagctccctgaatacaacattcttcctatgagataattgtagtctactatctattacagtaaatttccaatgcattttatctcactgattagattataaactcaacgtggggatcgtgtcttgtttttatatccaagcttgattgccaaagataatgatttgttttgtataaaagtgaatgaataaagtaacacatttgctttatttcagcttctttgcccaaaatgcagtgccaagttgggttccttcaactggtatggtgaacagtgctcttgtggtaggtggataacacctgcttttcaaatacataagaatagagtggatgaaatgaaaatattgcctgttttgggatcacaaacaggaaaaatatgaacatgatattttatagcttgggaagaaacttgcagatgatatgtgctgcctttgcttcttatcattcatggcagattgtttgtgctttcaacatttcatttgaaatgggagaagataaaatcacttgatgtaacctggaaactatgctttacatggcaatcaaagccttttgatcatgtacattttatttgatattaaaatcttttataaccagaaatactggcagtgtttc

SEQ ID NO: 861 - DNA, 2827 bp, Homo sapiens
  misc_feature (1)..(2827): n = a, t, g, or c
tgggctttgttgggccccccgggtttgtccccttttacccctctttttggggggcccccgggggggcgccaaaaaaagagaaattgttttttaaaaaagagtttttttgaggggggcccagagggcggcccccacaaaggntttcggtttacgatcaccgtaatttattgggaacattcggccccgggttctaccggtgagggtgcgattgggggtggttgggggtgtccgggtttgcgcgctgggaggtaaagaaaggcaggtttattagataaagtatgaaaatacattgcaagggtgcaacaggcaggtcagcaagagagaagctgactgctaggaaacaaaggcttgctggggattttgtagaatggtgcttatgttgtgggtggaagagggctttgtgcagtactaataatgccagggttgcagtgaactaacttccatttttctatcagctgagggtctggtgatggctgggcacaggcagattgtgagttatttgcacagcagggctatgtgtcctggaccacgaagaaaggcagacttatggcttgtctgctttctccttttgcttcccttcgtccagccagcctgactccttttccctaattaggactccacacgcaagggtttgttctgttccagaatagagacaggtcgatgtatctatctttataccagtactatagctgctacttcttgaccaattacagctttagtatctctctcacctgtcctccctatacaaaagatatataaaatatactcactgtactgagtatcttcctgcagcattcagtctggagcaaagcctgcttccttcaaccctttccaaaatccccaaataaaagcccaaaatctgtagaggatcttcctaacatcctcgtgctgagatgccctgaaattctccataactcatgactgagtaataaaaccaacttgcttaattaaagttggtttcttgtagtcctggccggaggacattgacttacaaaaatataggattagtatcttcaaaataaatagacagtaaacatcaacaaggattcacaccccaataatgaaattgggcagaaaaaggaaaaataatcatgaaatgcacagtaaagatggctccataatattgaaaaaaattttacttcaaatgcataaaatgatgcttctgattcagctggtgcgacatttatttcacatttgagttcagctgctcctgatgtctctttcctgaaaatttcaatactaagagctcgagaaaccctgtatttggggaagcttatccttcaccatcaactttgggggtaggggtcagagggaacaagggtggaaaggccgcgctgaatggggccgaagctccgcccctcagcgataagtccagattcctgcggccgacgtggtcctccgagggagcagcagagccgccgaggctggcgagtcccaggggaaggatgttctagccggagtctactcgatggtagggcaggaagccgccttgtctctgggcgcggccatgttggaggctccgggcccgagtgatggctgcgagctcagcaaccccagcgccagcagagtcagctgtgccgggcagatgctggaagtgcagccaggattgtatttcggtggggccgcggccgtcgcggagccagatcacctgagggaagcgggcatcacggccgtgctaacagtggactcggaggagcccagcttcaaggcggggcctggggtcgaggatctatggcgcctcttcgtgccagcgctggacaaacccgagacggacctactcagccatctggaccggtgcgtggccttcatcggtcaggcccgcgctgagggccgtgcggtgttggtgcactgtcatgcaggagtcagtcgaagtgtggccataataactgcttttctcatgaagactgaccaacttccctttgaaaaagcctatgaaaagctccagattctcaaaccagaggctaagatgaatgaggggtttgagtggcaactgaaattataccaggcaatgggatacgaagtggatacctctagtgcaatttataagcaatatcgtttacaaaaggttacagagaagtatccagaattgcagaatttacctcaagaactctttgctgttgacccaactaccgtttcacaaggattgaaagatgaggttctctacaagtgtagaaagtgcaggcgatcattatttcgaagttctagtattctggatcaccgtgaaggaagtggacctatagcctttgcccacaagagaatgacaccatcttccatgcttaccacagggaggcaagctcaatgtacatcttatttcattgaacctgtacagtggatggaatctgctttgttgggagtgatggatggacaggtgagaacacattttattttctacaattttattttatgatctatattttattccttcttgcattttaagctctattttaactagtgttttgctccatttcttaatttctttatttctgaagattatatctttctagtgtagataagactatcaaaaataaaatatttttcaaaaaccagctgatccaacatagtgaactacttctggttgagagccctggtctaagttaataaatttcctttaaggctatttatatttttttcaaatataagactaacatttatttttaaactaattagaatatattggctgggcactcttgcctcattagctcatgcctgtaatctgagcactttgggaggctgaggcgggaggatcacttgagcccagggtttcgagaccagcttgggcaatatagtgagacctcatctctataaaagaaagtaaaaaatttttaat

SEQ ID NO: 862 - DNA, 1367 bp, Homo sapiens
ggatatttacataataaaatttgttagtttttttatttatggcttctgaatttcttttttttgagacggagtcttgctctgttgcccaggctggagtgcagtggtgtgatcttggctcactgcaacctccgccttctgggttcaaatattctcctgcttcagcctcccaggtagctgtgattacaggcatccgccaccatgcccaactaatttttgtgtttttagtagagacggggtttcaccatgttgaccaggctggtctcaaactcctgacctcaggtgatctgcccgccttggcctcccaaagtgctgggaattacaggtatgagccaccacactcagcctgcttctgagttttatgtctagttttctatagctcaagattaaaaataaaaactcttaccttataccatgcataaatcaaagagctaaacataaaaattaatgctataactaactacattagaagaaaatgcagttgccttattaggcttttttgatttacctattttcctggaatatcagtttgtctttaaatagctaagaatctgacttatatgctgtcaatacacacagttagtaatacagcatgaaaatcctaacatgcttttctatactttagccgtgatcattttcatttgaagtcctaaattacaaactgatttaaaagctatatatatatatatatatatatatatatatatatatgccacatccatgaaaccttccttaatcaaatctcaagcttcacttttctcccttcaagctccctgaatacaacattcttcctatgagataattgtagtctactatctattacagtaaatttccaatgcattttatctcactgattagattataaactcaacgtggggatcgtgtcttgtttttatatccaagcttgattgccaaagataatgatttgttttgtataaaagtgaatgaataaagtaacacatttgctttatttcagcttctttgcccaaaatgcagtgccaagttgggttccttcaactggtatggtgaacagtgctcttgtggtaggtggataacacctgcttttcaaatacataagaatagagtggatgaaatgaaaatattgcctgttttgggatcacaaacaggaaaaatatgaacatgatattttatagcttgggaagaaacttgcagatgatatgtgctgcctttgcttcttatcattcatggcagattgtttgtgctttcaacatttcatttgaaatgggagaagataaaatcacttgatgtaacctggaaactatgctttacatggcaatcaaagccttttgatcatgtacattttatttgatattaaaatcttttataaccagaaatactggcagtgtttc

SEQ ID NO: 863 - DNA, 2275 bp, Homo sapiens
  misc_feature (1)..(2275): n = a, t, g, or c
tgggctttgttgggccccccgggtttgtccccttttacccctctttttggggggcccccgggggggcgccaaaaaaagagaaattgttttttaaaaaagagtttttttgaggggggcccagagggcggcccccacaaaggntttcggtttacgatcaccgtaatttattgggaacattcggccccgggttctaccggtgagggtgcgattgggggtggttgggggtgtccgggtttgcgcgctgggaggtaaagaaaggcaggtttattagataaagtatgaaaatacattgcaagggtgcaacaggcaggtcagcaagagagaagctgactgctaggaaacaaaggcttgctggggattttgtagaatggtgcttatgttgtgggtggaagagggctttgtgcagtactaataatgccagggttgcagtgaactaacttccatttttctatcagctgagggtctggtgatggctgggcacaggcagattgtgagttatttgcacagcagggctatgtgtcctggaccacgaagaaaggcagacttatggcttgtctgctttctccttttgcttcccttcgtccagccagcctgactccttttccctaattaggactccacacgcaagggtttgttctgttccagaatagagacaggtcgatgtatctatctttataccagtactatagctgctacttcttgaccaattacagctttagtatctctctcacctgtcctccctatacaaaagatatataaaatatactcactgtactgagtatcttcctgcagcattcagtctggagcaaagcctgcttccttcaaccctttccaaaatccccaaataaaagcccaaaatctgtagaggatcttcctaacatcctcgtgctgagatgccctgaaattctccataactcatgactgagtaataaaaccaacttgcttaattaaagttggtttcttgtagtcctggccggaggacattgacttacaaaaatataggattagtatcttcaaaataaatagacagtaaacatcaacaaggattcacaccccaataatgaaattgggcagaaaaaggaaaaataatcatgaaatgcacagtaaagatggctccataatattgaaaaaaattttacttcaaatgcataaaatgatgcttctgattcagctggtgcgacatttatttcacatttgagttcagctgctcctgatgtctctttcctgaaaatttcaatactaagagctcgagaaaccctgtatttggggaagcttatccttcaccatcaactttgggggtaggggtcagagggaacaagggtggaaaggccgcgctgaatggggccgaagctccgcccctcagcgataagtccagattcctgcggccgacgtggtcctccgagggagcagcagagccgccgaggctggcgagtcccaggggaaggatgttctagccggagtctactcgatggtagggcaggaagccgccttgtctctgggcgcggccatgttggaggctccgggcccgagtgatggctgcgagctcagcaaccccagcgccagcagagtcagctgtgccgggcagatgctggaagtgcagccaggattgtatttcggtggggccgcggccgtcgcggagccagatcacctgagggaagcgggcatcacggccgtgctaacagtggactcggaggagcccagcttcaaggcggggcctggggtcgaggatctatggcgcctcttcgtgccagcgctggacaaacccgagacggacctactcagccatctggaccggtgcgtggccttcatcggtcaggcccgcgctgagggccgtgcggtgttggtgcactgtcatgcaggagtcagtcgaagtgtggccataataactgcttttctcatgaagactgaccaacttccttcaactggtatggtgaacagtgctcttgtggtaggtggataacacctgcttttcaaatacataagaatagagtggatgaaatgaaaatattgcctgttttgggatcacaaacaggaaaaatatgaacatgatattttatagcttgggaagaaacttgcagatgatatgtgctgcctttgcttcttatcattcatggcagattgtttgtgctttcaacatttcatttgaaatgggagaagataaaatcacttgatgtaacctggaaactatgctttacatggcaatcaaagccttttgatcatgtacattttatttgatattaaaatcttttataaccagaaatactggcagtgtttc

SEQ ID NO: 864 - DNA, 265 bp, Homo sapiens; identical to SEQ ID NO: 855

SEQ ID NO: 865 - DNA, 351 bp, Homo sapiens
gctcactgcaaccttcacctcctggttcaagcgattctcctgcctcagcctcctgagtagctgggattacatgtgcctgccaccatgcctggctaattttgtatttttagtagagacgggatttctctatgttggttaggctgttctcgaactcctaacctcaggtgatctgcccgccttggcctcccaaagtgctggggattacaggggtgagccaccatgcccggccttaaatacttttttaaaattttaaaatgactcatttttattgaagttcagagtgataaacaaacgttccattaggccctatgtcctgctgtgctctgctaggttaactgacttcttggaatt

SEQ ID NO: 866 - DNA, 2578 bp, Homo sapiens; identical to SEQ ID NO: 856

SEQ ID NO: 867 - DNA, 265 bp, Homo sapiens; identical to SEQ ID NO: 855

SEQ ID NO: 868 - DNA, 2578 bp, Homo sapiens; identical to SEQ ID NO: 856

SEQ ID NO: 869 - DNA, 265 bp, Homo sapiens; identical to SEQ ID NO: 855

SEQ ID NO: 870 - DNA, 2578 bp, Homo sapiens; identical to SEQ ID NO: 856

SEQ ID NO: 871 - DNA, 732 bp, Homo sapiens
gtctcatctgttcatgaaggagctgcagtttacagagtgtttaagcgctggcgagctgtgaatttgcactgggatgtgttaaattatgacaaagccacagacatcgaagaaagcagccggggagagtcttccacaagtaggactttgtggttgccattgacagctctgcggaacagaaacttggtccacccaactcagttaacctcaccaaggtttcagtgtggctatgtgttattgcacctgttcaatcggatgaggccccatgaagacttatcagaagataacagctcgggggaggttgtgatgagagtgacttcagtgtgacaaaagcataagatgatgcagtgtggaccaccctgcacattttgcaatgtaattgcagtgaatggcaaaaccatagcacttctaaaaacacatctatgaactttttaaaatttatgctttttatatgaacatttgaattgcaaatacatttttctgagaaaaagaatcctcttgttcttcgttgtctggtttgtcacatcttttataagttggtacttgaaatcattatacatataatttaactatacttggttaaaagaataatgaaagttatccttaaggccaaaactattttttcttgcttgttttaaatatatttttatgaaagctttcgctctgtgtgtaatttttcagacctgttacaaatggttaagagtttaggatgctgtgggcagattccaaagtgcc

SEQ ID NO: 872 - DNA, 662 bp, Homo sapiens
aagagaattgatacatttccattgtgtttagcacagatgagtgataaagagtacacagaaggctttggatagaaatagttcatgccctccagggacagataatctaaggccaaccataatcatatgaacacataaaaatgtaaagtgtcatgaaaaaatactgtaaaggtgtttttagtacattataaccatggtaaaaaatatgtcagactaatcttactagtagtttattgcctctatggtattgtttgattatattgtgttatattacatggtgtcacatagtttttcctgttaaaatatctgaaagtttcactgctagatattaaaaacttttgtattctctagtcacctaatgaaatacagatatctctgggagttgaaataattttaaccattatcaggtaattcttaaggagctcattgtaagaaacgtgataaaccacatgaaaattttgcatggtaagtaccaggagactactgtgcactacagtgtatcatggatatattttacaagaggagcacgtgattcagtcctgggaagatgccatctaggctgaatctcaaatgatgagtagatgttagctgggcagattgttctctaagcaaaaatcttaaaactcccaattcctctttgcccccaaaacctttcatttgttaaa

SEQ ID NO: 873 - DNA, 478 bp, Homo sapiens
tggcttcgaaagcggccgaggcagccgaagccgctttcgaagttagcaaacaaagcgtctccccagtaaccgcccggttccagacgaggctcctgccactcaggccgcggagtcgcagcgtcgcccagcccccggctcctcctccctgcgtctctcctccctccgctcccggctccccagcggataggagccaccaatcccagccacagacaacccttcaaacgaaatagcgaggcggccccctctaacgggcggcgggggcgctggccccctccctgcgccacatctgtcccgcaccgggcgcagcagctgattcatctgcagccaggtccgggaaggaactgtgctcccggcagttgcagggcagcgtccgggcgggtggcttgtccccaggaccgcgctccccccgagccgttttaggtgtgtgttctcttctgtcccgagcagtcagcaaaccacagaagaaaaaaatcgtaag

SEQ ID NO: 874 - DNA, 218 bp, Homo sapiens; identical to SEQ ID NO: 519

SEQ ID NO: 875 - DNA, 2705 bp, Homo sapiens
aaatgctcggtgctttaaatttgcaattaccatatttgcagaaacttgaaaaatcatcccaattaaatgacaaaatgtataggaggattatctttcttttgcccttacaactcaaattatattcgaagtaacatttttacagcagtcaaaacttttaaccaaaactcacacctgcagtctcataagtttaacaaaatggccacattccacgctttattttcttaacaaccctgactgtttaaatgactcccattgaaccaacagcttacagttgctgggcaataaaaaagcgagcaaaaggacctccagccctgctgttttagctattacccagcactctcagagtttgctctagtctggctgttcaatcaaattcattttccagtagcttctggcctttgtctcctctttctggccacgcatttcattgcctcctgaatttgatgacaacattttctttcttcactttgaatcttggcccagaatctcactctcccagccccatggaaagatggggaaaagatttcattctgctgatcaaatttgttagaagacattctttagagtctgaaaaaatatatttcattagcagttctctaggtagtggaatttttagtgatgtttactcttttttccttgttctaattttcctctaataaacagaaaaaaagcaagagtaacccaccaaatttggataaagggcttctgcttttcatattctcttcaaccagaacagcttaacttttctccatttatttatttaagtatttattcatatttgaaacaggctggggtgcagtggcatgatctcagctcactgcaacctccacctctcgggtacaagtgattctcctgccttggcctcccaaagtgctgggattataggcgtgagccaccgcacctggccttaatttgatttttattatccacaacactcatatctctttttgatcctactgtaatatcacattatcctacctaaagatgaattgttccaaccctgatgctttggtaatcatcttttctaaattaaaaattgaggccaggtgcagtggctcaggcctgtaatcccaacactttgggaggacgaggcaggtggatcgcttgagatcaggagtgagagaccagcttggccaacatggtgaaaccccatctctactaaaaatgcagaaaaattagctgggcatggtggtgcatgcctgtaatcctagctacttgggaagctgaggcacgagaatctcttgaacccgggaaggagagattgcagtgagccaagatcatgccactgcactccagcctgggtgacagaacgagaccctgtctcaaaaaaagaaaaaaaaaaaagagagagagagatttgtaatctagcaaaatatgttatttacttattttctttccaacttttagtgtgggcccaagcgggtacctgtgcaggtttgtttcacgagtaaattgtgtgtcatgggggtttgttttacagatgattttgttactgagataatcagcataatatgtgatatgtagttttttaatccttaccctcctcttatctccaccctcaggtaggccccagtgtctgttgttcccttctttgtgtccatgtgtactcaatgtttagctcccacttataagtgagaatatgcagtatttggttttctgttcctgcattaatttatttagagatcttttatttaaatacatgaattcattttcaggaaaagccttccagagatataaaagtcaaaatccaataaaagaatgacctttgttatggaaaaacaaagaaagaaagaaatcaggtcttttttggaaaatctgggacattgaattgttacacgtaacatgtgtccccctagggacataggtcactttcagtatttgccaaagcattaggtcagccagacatgtgaaacatctcggagcttaataactgagctgcttcaatgtgttttgataaaagtttaaattctctggccccaatttattgaacacatgcctttgacaatacagcatttctttcttaggctattagtgaaagattaaccatctactcagtgattgttattgtgcctgtatgtgtgcagtatgaacagttatgtaacaaaactgcaaagattagagacctttaaaaggatctggggaaataggaagagtctataatcttataggaaaggaatgaattatgcaagcaactaaaagtgtgtcaatattctctgcttcacaaacaaattggaaaccagtggtaaactttagatcagaaacagaaactcaaaaaatgaaagaactggccatgagcagtggctcaggcctgtaatcccagcactttgggaggtcgaggcaggcggatcacctgaggtcgggagtttgagaccagcctgaccaacatggagaaaccctatctttactaaaaatacaaaaaattagacaggcatgatggcagatgcctgtaatcccagctacttgggaggctgaggcaggagaatcacatgaacccaggaggtggaggttgtggtgagcctatgttgcgccattgcacttcagcctgggcaacaagagcaaaactctgtctcaaaaaaagaaaaaagaaaaagaaaagaagaaaaagaaagaacctagaaacttagaggtcaactaaggagacaggcatttttataaaaagagttgaaagaaatttgtggtagaataacagaaaatacagacaagtt

SEQ ID NO: 876 - DNA, 2486 bp, Homo sapiens
aaatgctcggtgctttaaatttgcaattaccatatttgcagaaacttgaaaaatcatcccaattaaatgacaaaatgtataggaggattatctttcttttgcccttacaactcaaattatattcgaagtaacatttttacagcagtcaaaacttttaaccaaaactcacacctgcagtctcataagtttaacaaaatggccacattccacgctttattttcttaacaaccctgactgtttaaatgactcccattgaaccaacagcttacagttgctgggcaataaaaaagcgagcaaaaggacctccagccctgctgttttagctattacccagcactctcagagtttgctctagtctggctgttcaatcaaattcattttccagtagcttctggcctttgtctcctctttctggccacgcatttcattgcctcctgaatttgatgacaacattttctttcttcactttgaatcttggcccagaatctcactctcccagccccatggaaagatggggaaaagatttcattctgctgatcaaatttgttagaagacattctttagagtctgaaaaaatatatttcattagcagttctctaggtagtggaatttttagtgatgtttactcttttttccttgttctaattttcctctaataaacagaaaaaaagcaagagtaacccaccaaatttggataaagggcttctgcttttcatattctcttcaaccagaacagcttaacttttctccatttatttatttaagtatttattcatatttgaaacaggctggggtgcagtggcatgatctcagctcactgcaacctccacctctcgggtacaagtgattctcctgccttggcctcccaaagtgctgggattataggcgtgagccaccgcacctggccttaatttgatttttattatccacaacactcatatctctttttgatcctactgtaatatcacattatcctacctaaagatgaattgttccaaccctgatgctttggtaatcatcttttctaaattaaaaattgaggccaggtgcagtggctcaggcctgtaatcccaacactttgggaggacgaggcaggtggatcgcttgagatcaggagtgagagaccagcttggccaacatggtgaaaccccatctctactaaaaatgcagaaaaattagctgggcatggtggtgcatgcctgtaatcctagctacttgggaagctgaggcacgagaatctcttgaacccgggaaggagagattgcagtgagccaagatcatgccactgcactccagcctgggtgacagaacgagaccctgtctcaaaaaaagaaaaaaaaaaaagagagagagagatttgtaatctagcaaaatatgttatttacttattttctttccaacttttagtgtgggcccaagcgggtacctgtgcaggtttgtttcacgagtaaattgtgtgtcatgggggtttgttttacagatgattttgttactgagataatcagcataatatgtgatatgtagttttttaatccttaccctcctcttatctccaccctcaggtaggccccagtgtctgttgttcccttctttgtgtccatgtgtactcaatgtttagctcccacttataagtgagaatatgcagtatttggttttctgttcctgcattaatttatttagagaatgacctttgttatggaaaaacaaagaaagaaagaaatcaggtcttttttggaaaatctgggacattgaattgttacacgtaacatgtgtccccctagggacataggtcactttcagtatttgccaaagcattaggtcagccagacatgtgaaacatctcggagcttaataactgagctgcttcaatgtgttttgataaaagtttaaattctctggccccaatttattgaacacatgcctttgacaatacagcatttctttcttaggctattagtgaaagattaaccatctactcagtgattgttattgtgcctgtatgtgtgcagtatgaacagttatgtaacaaaactgcaaagattagagacctttaaaaggatctggggaaataggaagagtctataatcttataggaaaggaatgaattatgcaagcaactaaaagtgtgtcaatattctctgcttcacaaacaaattggaaaccagtggtaaactttagatcagaaacagaaactcaaaaaatgaaagaactggccatgagcagtggctcaggcctgtaatcccagcactttgggaggtcgaggcaggcggatcacctgaggtcgggagtttgagaccagcctgaccaacatggagaaaccctatctttactaaaaatacaaaaaattagacaggcatgatggcagatgcctgtaatcccagctacttgggaggctgaggcaggagaatcacatgaacccaggaggtggaggttgtggtgagctgagaatgcacggtagcctaggtgacagggtgagacgctatctc

SEQ ID NO: 877 - DNA, 2811 bp, Homo sapiens
cgccttgcagtttgatctcagactgctgtgctagcaatcagcgagactccgtgggcgtaggaccctccgagccagtgagatgaacccggtacctcagatggaaatgcagaaatcacccgtcttctgcgtcgctcacgctgggagctgtagaccggagctgttcctgttcggccatcttggctcctccctcaggtatccttcagaaagcctgggcaataaaccgaaggcttctaaaaagagcaaagtgtctggtgagtcaagcagaatctcaaagctgaactaaatttggtgaatctggactttgccagccctgaagaagaataagcatgaaggaactcttcaagtagctagtgcatttgtgttgctgtcagcaaaatagccagttggagagctatgctgttctccactaaaagaattgtagaaccattgggctttaatagatttgaaagactgtataattgaatttataatcatctggcttagaaaatatgcaaaatcacattcatagtgagcagatgagttatggtatccgtggacaattctgataggaaatattggttatatctggtgaaacccatgataaaccaaaggcacgttaagggcagatggttggagttggggtatgagtgttggtcatacggtggaggggaaaagagtaggatgttaggatcatgcagaaattatgtggttgccctacagaaatgataagccataaagttctactctggccagtgttttaagtcgatgctagaaaagaaaaacaatagtggcacaggggttggttatttgttttccacaggccaagaatatgtcaaaataaagcccaataggatgtatattcagtggtcaagtagactgagagatgttaacacacttattcatggcatcatttcagattttgcctatagtaggcattcaaaagatgtttgttaaattttataaataaacaaaagctatatcagcatggcctttttctaatccaaaacctgggcacacagccaggataaacttaagctgtccaaaagccatgtgcgctctcgccagaatcatcaattctctccagtcatttcactatgaagaaggcctggatgaacttaatgggaaagycccattagctgccactcttggattgcatatctacgtatccttcagatttcatgtccctgatatatttgtgttcttgctagtcctgattttaaattattgcttttccttttaatattgttctgatttatttttatatgttactcaatattctttaatgacagcaaataatgataaaaataatagctgccatggcctattgaggcttcctatgacagaaactcttctaagataaaatttcatcctcatgacaactcataacctttgagaaagtttccatagatttctattttactactaaaaatactgtggtttagtgagattatgcaattaactcaaattcacaaagataggaaatgcttcagctgggatgcaaacctctatctaagagaaaaacccgatttcctcattgctatatataccattaatttggagcaaagcagaatcacttaaaaatccttttaagtgatgattaaataaatcatcaattgttaaacaatgattagattcctaattattttcagtcatttgtttaccactaaatataacaatagtagtaataataataatgataacccatctgcctgtgttcttaagtgtcttatatattagttgtggaaataagacatatatgatgaactgttaaaaactatagaagagaatttatacctaaatatgttcatgtattaagtagtacaagaaagtcatctggaaattttaaaatgaaaggaaatctgcaaatattaagtcaactgggcatttcttttcaggaaatgaaaattaagctgaatctgaagggtgctaagaacaaaattgatggaggtgaagacagagacttctacataaaggaaatagttagraattaagcacagagacaaaaataaaagacagtgttttgtaggggcagagtgattgggcatagccaagaaacaggatatattaagtagattgataataaggtttmaatgcttcaaaagttctaagcttagatgcttggaaacaaaatttgaccaagaatttgggtaataaatttgaagaataaaatgagaagcttaatttgcatgtgttcagtttaaaatgatatccggttggaaataccaaattgtagagctggagacattgtactgggaattgagtaatggtcaggatttattacactgggacagaagagaccaacacatagaatacactgaaggtcaggttctgtccagaaaccactcaacaccagagcattaatgaatatgtgaataagtaagtgcatcttcttagctcaggcatggaaactgatttaaaatgtaagaagtctgtatggatgggagaaagaagtggaaatcaatttaagggaaaaaaaagcaaaatcagaatatacaatctctcttctgaggccctagtcatatgttgctaactatagaggagtcattagataaaagtgtgtacatttggaagcaaacaaagactgcatcccatgagatttcataagctatgattattataaagagcaatagactctcaaaaatactcttaaaatactatacataaaaatagctagtatttaaaggctcataaaattcttgaacaggtattagccatttaagaagtgatggtagaaagagaaatgtataggtcagagaacagtccttggaaaatgaaaggagttaggaagtaaaagaaagaaaatcaagggaaataaatgaaagaatgacagag

SEQ ID NO: 878 - DNA, 235 bp, Homo sapiens
rkttcattattaattataccaatcctttcatatatgtagaaaaaatgtttgagttggtcatctgtcttttattgaagatgcatttcaaatatcaaatatatttgaaagataaaatagcatctgtgaaattgaatattattttatgtgcgcttggctatgccctaaaatgtcagtttattrtccctaaagacgtatttattgatgtttaccaagaatagaagttggctgggcacaa

SEQ ID NO: 879 - DNA, 1785 bp, Homo sapiens
gataactcacagtctttcactagatgagaactgtgtccagggtactggccccttatctcacttgggcttatgctaaagatgtaaaatgtggtatagatgcccaagccttaatgcttcaaggtgcagaacttttagccgatgctgtagccattacaatggggtcaaagggaagagcagtgattattcaacagagctgtggagatcccaaagtaacaaaagatggtgtgactgttgaaaaatctattgacttaaaggatgaatataacagtattggagttaaacttgttcaagatgttgccaataacacgagtgaagaggctggggatgacactaccactgtactgttctggcatgctctattgccaaggatggcttcaagaagattagtaaaggtgctaatctattggaaatggggagaggtatcccttaatgcaataactgctgttgaagaaggcattgttctgggaaggggctgtgccctgcttcaatacgttccagccttgtactcattgactccagctagtgaagatcaaaacattggtatagaaattaaaagaatattcaaaattgctgcaatgacaattgctaaaaatgcagatggccggttcctgccttaactgatgacattccaccacaaaaaaagaaatgaaaatggcctgttcctgccttaactgatggcattatcttgtgaggcatctcaccaatttcaaatccgatcttctcggcttagcggctgaagactgacactgcccgatcgcctcagaagccccctagaccatcacggatgccgagctttagtataagaagacaggaatgtcaggcctctgagcccaagctaagccatcatatcccctgtgacctgcacatacacatccacatggccggttcctgccttaactgatgacattccaccacaaaagaagtgaaaatggcctgttcctgccttaactgttgacattatcttgtgaaattccttctcctagctcatcctggctcaaaagctcccctactgagcaccttgtgacccctactcctgcccgccagagaacaacccccctttttcctttacctacccaaatcctataaaacagccccacccttatctcccttcactgactttcttttcggactcagcccacctgcacccaggtgaaataaacagctttattgctcacacaaagcctgtttggtggtctcttcacacggacatgcatgaaagctttccatatttgtgttccaaagaatcacattcagagactctcttattaccataagaaatagataagcgcatgtattttttttttctaaactctgatatagtcttcttttcaggccagtcataagtttgccttgtttaatggactcattcaaacatagtagttacatctacttagttttatgcatttttgtatttaaatatttttatatatgctatcaattttctttaaataagtaatgctttcatttaatttgcttactaaggttattttttaacaagattaaattaacaaaacgcttttatcttgtcaacatttctaacaaatttctttagttcacttaagtcaattttaacaattctaggggctaattttatttaaaatgattatttaacatgagtgtttaatttcagtgttaaatctacatgtaaagtgttgaattcacaggaaacaaaacatattccttggtgtcaaagatcatataatctagtatttaaggattcaagtattcaaatagataattattaaaagtaaaaatttatcgaagctttgaatgttgtgctatgga

SEQ ID NO: 880 - DNA, 2418 bp, Homo sapiens
aactgaagaggcggcggagggccgaattcccttttctcaacggcttgatttcagagctgggctggtctctgacaggctcagctggagagggacgggttgggacgcactgtccttttgcccttccccctccgcgagcagaagctgactccgcaggagcgagggtcgcagagctgggtgagcggaaatgtccctcccagagtgaagtcgcagggcccgccccgcgtctgagggagcggaggtcttcctgggggatttcagtctccacatagttttggagccggacttttgaagaatgattcgtgaatccggaatgggtgacagcgtcatcacggcattttattgacagaccatggattcttacagtgcaccagagtcaactcctagtgcatcctcaagacctgaagattactttataggtgccactcctctgcagaaacgattagaatcggtcaggaagcagagttcatttatcctgactccacctcgaaggaaaattccccagtgttcgcagttgcaggaagatgttgaccctcaaaaggttgcattccttctgcataaacagtggactttatatagtttaactcccttatataaattctcctatagtaatctcaaagagtattctagacttctcaatgcttttattgttgctgaaaagcaaaaaggacttgctgtggaagtgggagaagacttcaacatcaaagtgattttttctactctcctaggaatgaaaggaacacaaagggacccggaagcatttcttgtccagggtctcattttgtcacccaggctggagtacagtggcacgatcttggttgactgcaacctctgtctcctgggctcaagtgatccttccaccttagccttccaagtagctgggactgcaggtgcatgccaccacactcggattgtgtcaaaatctcaattgccatctgagaatagagaaggtaaagtgctgtggactggctggttctgctgtgtatttggagacagtcttctggagactgtttcagaagatttcacctgtctgcccttattccttgcaaatggagcagagtctaacacagcaataattggaacttggtttcagaaaacctttgactgttatttcagtcctttagcaatcaatgcatttaatctttcctggatggctgccatgtggactgcatgcaaaatggaccattatgtggctactactgaatttctttggtctgtaccctgtagccctcaaagtctggacatttctttcgcaatacatccagaggatgcaaaagctctatgggacagtgtccacaaaacacctggggaggttacccaggaagaagttgacctattcatggattgcctttattcacatttccatagacatttcaaaattcatttatcagccacaagattagttcgtgtttcaacatctgtagcttcagcacatactgatggaaaaataaagattctgtgtcataaataccttattggagtgttagcatatttgacagaactggcaatttttcaaattgagtgaagccttatgtggactataagttatagattatatactcttattgataacttgcctaattgctatgctgaaagagactgcaggagaaataggcatctatctctgcatctgttttccccaccatgcctttggagttgccaagatggaagccaagaaggatctagaagaacaaagaatatggtagtagatgagccacagccaggtgcccatgtactaatcatgataacctgacatgccattctcaaaatgctgagttgttaatttcttgtcatctttaaatatatatatataggctgggcttggtggctcacacctgtaattccagcactttgggaggctgaggtgggtggatcatttgaggccaggaattcaagaccagcctggccaacatggtgaaaccccttctctactgaaaatacaataattagctgggcgtggtggcacatgcctatgatcccagctactggggaggctgaggcaggagaatcgttttaacccagaagacaggctgcagtgagccaagactgcaccactgcactccagcctgggcaacaaagtgagactctgcctcaaaaaataaaaaagaaataaaataaataaatacagcgtttattatgtttaaactcttaggattcaaatgagatgtatctaatggatatttctgatttgggtctttaaaacctttaatctcttttaagcattttagacttgcattcagaaagaattctgtcttctaaagacattttcctagcatttcactgcggagaactggcaatcaaaatcccctcaaaagggaactaaagattaatatacacatttttttagtcattaatatgcttctgttttaaatacagttcaactcctgttgcaatgttgaattaaatgtttattttaaaatg

SEQ ID NO: 881 - DNA, 2364 bp, Homo sapiens
aactgaagaggcggcggagggccgaattcccttttctcaacggcttgatttcagagctgggctggtctctgacaggctcagctggagagggacgggttgggacgcactgtccttttgcccttccccctccgcgagcagaagctgactccgcaggagcgagggtcgcagagctgggggatttcagtctccacatagttttggagccggacttttgaagaatgattcgtgaatccggaatgggtgacagcgtcatcacggcattttattggtaaagatgctttgtattggtcccggacctgctttaactttgtatttgccctgttgtgtggtcattatcttacaatacttgcgtgttgaggtgtgtttaaacactacgtgcttaacactggctaagtattggcattggggcggttggatttaggtattggtggcaatgtagaaaagtgatcaagtcagagccccttcacggactaatcacaagagaaacaacaaagctttacttgtgtgctgtgaaccacaactgcaagtggaattgtcaagagaactagccctgccaagctcaggaaaacttctgaggagatggcacatggaaaatggataagatttactgagacaaacgggagtagagaagtgtttttaattggcgataaggtgaataaaaaggcagggagaacagtagagtgatcatctgtctagagtagggggtgcatgtttgggtatagggctgtcatttaacctcttaaagaattgtctactggaactttcttcactcccatccccccaccccccaatgttgtatacaaaaccttagaggaagtgtatgcagaatgttggattttggaaaggctaatgtcgatggatcttggggaagaactgaagtagtagaaaatgaacctggataggatcagataataagatcaaatacagtagtgccttgaaagccagacaggaattctgatttgacttcatatagatgtgtgggaactgttatgggatctcaagcaaggtaatgataaaagtggtgacaatgaaagactgatgatggattagggaaaggggctaagattgggaacaagataagtagctataattgagaatgaaagtgaagcccacatctaagaggacaagtgtatatctttttaagaaatatgtcagaggccaggtgtggtggcttatgcctgtaatccagcactttgggaggccaaggcaggcggatcacctgaggtcaggagttcaagaccagcctggccaacatggagaaaccccatctctaccaaaaaatacaaaaattagccaggcgtgttggtgcatacctgtagtcccagctactggggaggctgaggcaggagaatcacttgaacctgggaggtggaggttgcagtgagccaagattgcaccactgcactccagcctgggagacagagtgagactctgtcttcaaaaaagaaatatgtgagaatttgatgataaagttaacaaagttaactttttagatgtaaaggtgatgttgaaggaagagtaaaagatgatgaaagttttttagtggggaaagaaaatgaaaaggaagaatggaattattactgagcaaaacagagtacagtagttggcaaagaaagattgaataagatgtgaagcgatgattagttttgaacttaatgagtttgacggaggttggaaatgcaggactgggttgcagctgtaatggtctgaagacagagatttaggagtcatatagaatgattattttcctatgtagaatgaatgattttcagaatctggggccacctactattggaacatgaggaaaaaaaaagaatcagtaaataaattggaactataaaaagtaaggaggagaaaagcccctaaaaaatggaatgtcagaggaaacaaggtcccagaaagtttagaggagtaaggatgaacaaacttgatgaacaaagtatttggccatggttttggcaaaaacaatgatcttcgaaagtacagtttctttgtagtgatagatggaagaaagagattgctgaagatttctagtaaaatatttattagtaactggaggcaataggtgtagacgacgtttccaggagattggtctcagaaggaatgagacgaattggatttaaacacaaatttttaatgttagaaatactagaatatgcttggcagtgaaagaaaaggatcctgtataggagtgattaaagatgatagagatgtgaagtacagcctggttgtggtggtgcacgcttgtagtcctagctactcgagaggctgaggtgggaggatcgcctgagcccagcaggtggaggctgcagtgatatcaggccactgcactccagcctggacaacagagtgagaccctgtctc

SEQ ID NO: 882 - DNA, 2280 bp, Homo sapiens
aactgaagaggcggcggagggccgaattcccttttctcaacggcttgatttcagagctgggctggtctctgacaggctcagctggagagggacgggttgggacgcactgtccttttgcccttccccctccgcgagcagaagctgactccgcaggagcgagggtcgcagagctgggtgagcggaaatgtccctcccagagtgaagtcgcagggcccgccccgcgtctgagggagcggaggtcttcctgggggatttcagtctccacatagttttggagccggacttttgaagaatgattcgtgaatccggaatgggtgacagcgtcatcacggcattttattgacagaccatggattcttacagtgcaccagagtcaactcctagtgcatcctcaagacctgaagattactttataggtgccactcctctgcagaaacgattagaatcggtcaggaagcagagttcatttatcctgactccacctcgaaggaaaattccccagtgttcgcagttgcaggaagatgttgaccctcaaaaggttgcattccttctgcataaacagtggactttatatagtttaactcccttatataaattctcctatagtaatctcaaagagtattctagacttctcaatgcttttattgttgctgaaaagcaaaaaggacttgctgtggaagtgggagaagacttcaacatcaaagtgattttttctactctcctaggaatgaaaggaacacaaagggacccggaagcatttcttgtccagattgtgtcaaaatctcaattgccatctgagaatagagaaggtaaagtgctgtggactggctggttctgctgtgtatttggagacagtcttctggagactgtttcagaagatttcacctgtctgcccttattccttgcaaatggagcagagtctaacacagcaataattggaacttggtttcagaaaacctttgactgttatttcagtcctttagcaatcaatgcatttaatctttcctggatggctgccatgtggactgcatgcaaaatggaccattatgtggctactactgaatttctttggtctgtaccctgtagccctcaaagtctggacatttctttcgcaatacatccagaggatgcaaaagctctatgggacagtgtccacaaaacacctggggaggttacccaggaagaagttgacctattcatggattgcctttattcacatttccatagacatttcaaaattcatttatcagccacaagattagttcgtgtttcaacatctgtagcttcagcacatactgatggaaaaataaagattctgtgtcataaataccttattggagtgttagcatatttgacagaactggcaatttttcaaattgagtgaagccttatgtggactataagttatagattatatactcttattgataacttgcctaattgctatgctgaaagagactgcaggagaaataggcatctatctctgcatctgttttccccaccatgcctttggagttgccaagatggaagccaagaaggatctagaagaacaaagaatatggtagtagatgagccacagccaggtgcccatgtactaatcatgataacctgacatgccattctcaaaatgctgagttgttaatttcttgtcatctttaaatatatatatataggctgggcttggtggctcacacctgtaattccagcactttgggaggctgaggtgggtggatcatttgaggccaggaattcaagaccagcctggccaacatggtgaaaccccttctctactgaaaatacaataattagctgggcgtggtggcacatgcctatgatcccagctactggggaggctgaggcaggagaatcgttttaacccagaagacaggctgcagtgagccaagactgcaccactgcactccagcctgggcaacaaagtgagactctgcctcaaaaaataaaaaagaaataaaataaataaatacagcgtttattatgtttaaactcttaggattcaaatgagatgtatctaatggatatttctgatttgggtctttaaaacctttaatctcttttaagcattttagacttgcattcagaaagaattctgtcttctaaagacattttcctagcatttcactgcggagaactggcaatcaaaatcccctcaaaagggaactaaagattaatatacacatttttttagtcattaatatgcttctgttttaaatacagttcaactcctgttgcaatgttgaattaaatgtttattttaaaatg

SEQ ID NO: 883 - DNA, 2398 bp, Homo sapiens
aactgaagaggcggcggagggccgaattcccttttctcaacggcttgatttcagagctgggctggtctctgacaggctcagctggagagggacgggttgggacgcactgtccttttgcccttccccctccgcgagcagaagctgactccgcaggagcgagggtcgcagagctgggtgagcggaaatgtccctcccagagtgaagtcgcagggcccgccccgcgtctgagggagcggaggtcttcctggrygsgtttgtgtctcttgtgaacccacttgtggagcgagagggaatttgggagggccaggggttagtctggcctctgtcttagctgtcattttggcggttttttttttttttcttcaggggatttcagtctccacatagttttggagccggacttttgaagaatgattcgtgaatccggaatgggtgacagcgtcatcacggcattttattgacagaccatggattcttacagtgcaccagagtcaactcctagtgcatcctcaagacctgaagattactttataggtgccactcctctgcagaaacgattagaatcggtcaggaagcagagttcatttatcctgactccacctcgaaggaaaattccccagtgttcgcagttgcaggaagatgttgaccctcaaaaggttgcattccttctgcataaacagtggactttatatagtttaactcccttatataaattctcctatagtaatctcaaagagtattctagacttctcaatgcttttattgttgctgaaaagcaaaaaggacttgctgtggaagtgggagaagacttcaacatcaaagtgattttttctactctcctaggaatgaaaggaacacaaagggacccggaagcatttcttgtccagattgtgtcaaaatctcaattgccatctgagaatagagaaggtaaagtgctgtggactggctggttctgctgtgtatttggagacagtcttctggagactgtttcagaagatttcacctgtctgcccttattccttgcaaatggagcagagtctaacacagcaataattggaacttggtttcagaaaacctttgactgttatttcagtcctttagcaatcaatgcatttaatctttcctggatggctgccatgtggactgcatgcaaaatggaccattatgtggctactactgaatttctttggtctgtaccctgtagccctcaaagtctggacatttctttcgcaatacatccagaggatgcaaaagctctatgggacagtgtccacaaaacacctggggaggttacccaggaagaagttgacctattcatggattgcctttattcacatttccatagacatttcaaaattcatttatcagccacaagattagttcgtgtttcaacatctgtagcttcagcacatactgatggaaaaataaagattctgtgtcataaataccttattggagtgttagcatatttgacagaactggcaatttttcaaattgagtgaagccttatgtggactataagttatagattatatactcttattgataacttgcctaattgctatgctgaaagagactgcaggagaaataggcatctatctctgcatctgttttccccaccatgcctttggagttgccaagatggaagccaagaaggatctagaagaacaaagaatatggtagtagatgagccacagccaggtgcccatgtactaatcatgataacctgacatgccattctcaaaatgctgagttgttaatttcttgtcatctttaaatatatatatataggctgggcttggtggctcacacctgtaattccagcactttgggaggctgaggtgggtggatcatttgaggccaggaattcaagaccagcctggccaacatggtgaaaccccttctctactgaaaatacaataattagctgggcgtggtggcacatgcctatgatcccagctactggggaggctgaggcaggagaatcgttttaacccagaagacaggctgcagtgagccaagactgcaccactgcactccagcctgggcaacaaagtgagactctgcctcaaaaaataaaaaagaaataaaataaataaatacagcgtttattatgtttaaactcttaggattcaaatgagatgtatctaatggatatttctgatttgggtctttaaaacctttaatctcttttaagcattttagacttgcattcagaaagaattctgtcttctaaagacattttcctagcatttcactgcggagaactggcaatcaaaatcccctcaaaagggaactaaagattaatatacacatttttttagtcattaatatgcttctgttttaaatacagttcaactcctgttgcaatgttgaattaaatgtttattttaaaatg

SEQ ID NO: 884 - DNA, 2196 bp, Homo sapiens
ctcccagagcgcgaacccaaacacagatcgccgctggggtccaagcgcccttcaactccgcccgctagtgcccaagattaccgggaaggaattcaacgaatcagtggtgaggtgccgccgccatgcctactacgggcggaaatttgagagaaagcttcgcaccggggatttcagtctccacatagttttggagccggacttttgaagaatgattcgtgaatccggaatgggtgacagcgtcatcacggcattttattgacagaccatggattcttacagtgcaccagagtcaactcctagtgcatcctcaagacctgaagattactttataggtgccactcctctgcagaaacgattagaatcggtcaggaagcagagttcatttatcctgactccacctcgaaggaaaattccccagtgttcgcagttgcaggaagatgttgaccctcaaaaggttgcattccttctgcataaacagtggactttatatagtttaactcccttatataaattctcctatagtaatctcaaagagtattctagacttctcaatgcttttattgttgctgaaaagcaaaaaggacttgctgtggaagtgggagaagacttcaacatcaaagtgattttttctactctcctaggaatgaaaggaacacaaagggacccggaagcatttcttgtccagattgtgtcaaaatctcaattgccatctgagaatagagaaggtaaagtgctgtggactggctggttctgctgtgtatttggagacagtcttctggagactgtttcagaagatttcacctgtctgcccttattccttgcaaatggagcagagtctaacacagcaataattggaacttggtttcagaaaacctttgactgttatttcagtcctttagcaatcaatgcatttaatctttcctggatggctgccatgtggactgcatgcaaaatggaccattatgtggctactactgaatttctttggtctgtaccctgtagccctcaaagtctggacatttctttcgcaatacatccagaggatgcaaaagctctatgggacagtgtccacaaaacacctggggaggttacccaggaagaagttgacctattcatggattgcctttattcacatttccatagacatttcaaaattcatttatcagccacaagattagttcgtgtttcaacatctgtagcttcagcacatactgatggaaaaataaagattctgtgtcataaataccttattggagtgttagcatatttgacagaactggcaatttttcaaattgagtgaagccttatgtggactataagttatagattatatactcttattgataacttgcctaattgctatgctgaaagagactgcaggagaaataggcatctatctctgcatctgttttccccaccatgcctttggagttgccaagatggaagccaagaaggatctagaagaacaaagaatatggtagtagatgagccacagccaggtgcccatgtactaatcatgataacctgacatgccattctcaaaatgctgagttgttaatttcttgtcatctttaaatatatatatataggctgggcttggtggctcacacctgtaattccagcactttgggaggctgaggtgggtggatcatttgaggccaggaattcaagaccagcctggccaacatggtgaaaccccttctctactgaaaatacaataattagctgggcgtggtggcacatgcctatgatcccagctactggggaggctgaggcaggagaatcgttttaacccagaagacaggctgcagtgagccaagactgcaccactgcactccagcctgggcaacaaagtgagactctgcctcaaaaaataaaaaagaaataaaataaataaatacagcgtttattatgtttaaactcttaggattcaaatgagatgtatctaatggatatttctgatttgggtctttaaaacctttaatctcttttaagcattttagacttgcattcagaaagaattctgtcttctaaagacattttcctagcatttcactgcggagaactggcaatcaaaatcccctcaaaagggaactaaagattaatatacacatttttttagtcattaatatgcttctgttttaaatacagttcaactcctgttgcaatgttgaattaaatgtttattttaaaatg

SEQ ID NO: 885 - DNA, 1333 bp, Homo sapiens
aactgaagaggcggcggagggccgaattcccttttctcaacggcttgatttcagagctgggctggtctctgacaggctcagctggagagggacgggttgggacgcactgtccttttgcccttccccctccgcgagcagaagctgactccgcaggagcgagggtcgcagagctgggtgagcggaaatgtccctcccagagtgaagtcgcagggcccgccccgcgtctgagggagcggaggtcttcctgggggatttcagtctccacatagttttggagccggacttttgaagaatgattcgtgaatccggaatgggtgacagcgtcatcacggcattttattgacagaccatggattcttacagtgcaccagagtcaactcctagtgcatcctcaagacctgaagattactttataggtgccactcctctgcagaaacgattagaatcggtcaggaagcagagttcatttatcctgactccacctcgaaggaaaattccccagtgttcgcagttgcaggaagatgttgaccctcaaaaggttgcattccttctgcataaacagtggactttatatagtttaactcccttatataaattctcctatagtaatctcaaagagtattctagacttctcaatgcttttattgttgctgaaaagcaaaaaggacttgctgtggaagtgggagaagacttcaacatcaaagtgattttttctactctcctaggaatgaaaggaacacaaagggacccggaagcatttcttgtccagattgtgtcaaaatctcaattgccatctgagaatagagaaggtaaagtgctgtggactggctggttctgctgtgtatttggagacagtcttctggagactgtttcagaagatttcacctgtctgcccttattccttgcaaatggagcagagtctaacacagcaataattggaacttggtttcagaaaacctttgactgttatttcagtcctttagcaatcaatgcatttaatctttcctggatggctgccatgtggactgcatgcaaaatggaccattatgtggctactactgaatttctttggtctgtaccctgtagccctcaaagtctggacatttctttcgcaatacatccagaggatgcaaaagctctatgggacagtgtccacaaaacacctggggaggttacccaggaagaagttgacctattcatggattgcctttattcacatttccatagacatttcaaaattcatttatcagccacaagattagttcgtgtttcaacatctgtagcttcagcacatactgatggaaaaataaagattcagtgtcataaaaaaaaa

SEQ ID NO: 886 - DNA, 1737 bp, Homo sapiens
aactgaagaggcggcggagggccgaattcccttttctcaacggcttgatttcagagctgggctggtctctgacaggctcagctggagagggacgggttgggacgcactgtccttttgcccttccccctccgcgagcagaagctgactccgcaggagcgagggtcgcagagctgggtgagcggaaatgtccctcccagagtgaagtcgcagggcccgccccgcgtctgagggagcggaggtcttcctgggggatttcagtctccacatagttttggagccggacttttgaagaatgattcgtgaatccggaatgggtgacagcgtcatcacggcattttattgacagaccatggattcttacagtgcaccagagtcaactcctagtgcatcctcaagacctgaagattactttataggtgccactcctctgcagaaacgattagaatcggtcaggaagcagagttcatttatcctgactccacctcgaaggaaaattccccagtgttcgcagttgcaggaagatgttgaccctcaaaaggttgcattccttctgcataaacagtggactttatatagtttaactcccttatataaattctcctatagtaatctcaaagagtattctagacttctcaatgcttttattgttgctgaaaagcaaaaaggacttgctgtggaagtgggagaagacttcaacatcaaagtgattttttctactctcctaggaatgaaaggaacacaaagggacccggaagcatttcttgtccagattctgtgtcataaataccttattggagtgttagcatatttgacagaactggcaatttttcaaattgagtgaagccttatgtggactataagttatagattatatactcttattgataacttgcctaattgctatgctgaaagagactgcaggagaaataggcatctatctctgcatctgttttccccaccatgcctttggagttgccaagatggaagccaagaaggatctagaagaacaaagaatatggtagtagatgagccacagccaggtgcccatgtactaatcatgataacctgacatgccattctcaaaatgctgagttgttaatttcttgtcatctttaaatatatatatataggctgggcttggtggctcacacctgtaattccagcactttgggaggctgaggtgggtggatcatttgaggccaggaattcaagaccagcctggccaacatggtgaaaccccttctctactgaaaatacaataattagctgggcgtggtggcacatgcctatgatcccagctactggggaggctgaggcaggagaatcgttttaacccagaagacaggctgcagtgagccaagactgcaccactgcactccagcctgggcaacaaagtgagactctgcctcaaaaaataaaaaagaaataaaataaataaatacagcgtttattatgtttaaactcttaggattcaaatgagatgtatctaatggatatttctgatttgggtctttaaaacctttaatctcttttaagcattttagacttgcattcagaaagaattctgtcttctaaagacattttcctagcatttcactgcggagaactggcaatcaaaatcccctcaaaagggaactaaagattaatatacacatttttttagtcattaatatgcttctgttttaaatacagttcaactcctgttgcaatgttgaattaaatgtttattttaaaatg

SEQ ID NO: 887 - DNA, 1041 bp, Homo sapiens
ctcccagagcgcgaacccaaacacagatcgccgctggggtccaagcgcccttcaactccgcccgctagtgcccaagattaccgggaaggaattcaacgaatcagtggtgaggtgccgccgccatgcctactacgggcggaaatttgagagaaagcttcgcaccggggatttcagtctccacatagttttggagccggacttttgaagaatgattcgtgaatccggaatgggtgacagcgtcatcacggcattttattgacagaccatggattcttacagtgcaccagagtcaactcctagtgcatcctcaagacctgaagattactttataggtgccactcctctgcagaaacgattagaatcggtcaggaagcagagttcatttatcctgactccacctcgaaggaaaattccccagtgttcgcagttgcaggaatgaaaggaacacaaagggacccggaagcatttcttgtccagattgtgtcaaaatctcaattgccatctgagaatagagaaggtaaagtgctgtggactggctggttctgctgtgtatttggagacagtcttctggagactgtttcagaagatttcacctgtctgcccttattccttgcaaatggagcagagtctaacacagcaataattggaacttggtttcagaaaacctttgactgttatttcagtcctttagcaatcaatgcatttaatctttcctggatggctgccatgtggactgcatgcaaaatggaccattatgtggctactactgaatttctttggtctgtaccctgtagccctcaaagtctggacatttctttcgcaatacatccagaggatgcaaaagctctatgggacagtgtccacaaaacacctggggaggttacccaggaagaagttgacctattcatggattgcctttattcacatttccatagacatttcaaaattcatttatcagccacaagattagttcgtgtttcaacatctgtagcttcagcacatactgatggaaaaataaagattcagtgtcataaaaaaaaa

SEQ ID NO: 888 - DNA, 1066 bp, Homo sapiens
atgattgggctsaggttccagccggagcggtaactgggcgcaggtcccagccgccgcactaaacccggcccgtgcggtgattggacgcaggccccgggccgcggcggaggcgggcgatccgaaagaggctggtgctggctgcatggggaggcggcggcagcgggtggaccccgcggctggggcccgggccggggccctgcctgaggccatcgccgcgttgagtcggtcgctgccctcgggacccagccccgagatcttccgccgcgccaagttcgaccgtccggaggcgacctccgcgctctggcagctcctcttccgtgtgctctcgccactccctgcgggcaacgccttggcatcgctcgccctggaggtccaagcccgcttggtgaagtcagcactatgctcccagggctacccgaggctggcactggcacaactacctgaggatggctcgcagggcagtcgggagctgctgctggctctgtcctggctcttggcccgaggacctgtgcccgagcagatgctggcccaggcccgagtgcctctgggtgacgagatgactgtgtgccagtgtgaggccctggccagccctggcccacctgcaccccacatggaagcagagggtcctgtggatgtccgccatgtgcagtggctgatgggaaagctgcggttccggtggcgccagctggtgtccagtcagcaggagcagtgcgccctcctgagcaagatccacctgtacacacgcggctgccacagcgaccagagccttagccatctgtctgtcactgaagcagagatgctcagggacccagagggaggccagcagctgctgcggactctggagcgtgagaaccagcgcctggaggctgtcctggcgtggcggcgctctgagctggtcttctggcggtggatggacacggtcctgggcacctgtgccccggaggtgcctggcttcaacccttcaagacccaacttttctgggccgggggaacccccagccccggggggtgttccctatttgtacatggtgagatcgagcggcagaacgggcgggctccccccgaac

SEQ ID NO: 889 - DNA, 4439 bp, Homo sapiens
caagacgtggcacgggtgggggcccaggacgcaggagcctgggctgggcaggcagctggctaagggcaggctgttggaataaaggaacacagatctcaggtgtgagctggtggtgttggcatctcaagcaggtctcacttggtgtgtcagggggcacctaggggtgtggggggccagcccacactgggtgaagggttgggcacagggctgactgtgggaggggacaactgcccttcagaacccaaggccaggcccacatggggtgtgctggaccgagcctcccaagctggagccagctccataggccctggagacttgcagtcccgttctgcttgctacacccggaccacccgggggcacggcgctttctaggcaggcctgcccccggcgaccggggctctgtggtcccaggcagatcctgagccctggatagcatagacctggaggaaaacctgcctctgagccccaggtggctgtgtgaccttggggagacagcatcctcctctgactggggctgctggagcactgacccaagtgttagggttgacctagccccaggcatcttccccagggatggccgcttcctcgcaccctgctgctggccttccatcctcatccttctttctgggggtctgcccgcccgtcatcactggcttcttcctcttggctggcttggtttcaggggatagggcagggctggctgccactcttttaatttattttatttatttgagacagagtctcgctgtgtcgcccaggctggcatgcagtggcacagtcttggctcactgcaacctccgtctcctgggttcaagcgattttcctatctcaacctcctgagtagctgggactacaggcacctgtcaccacatctggctaatttttttgtatttttagtagagacggggttttgccacgttggccaggctggtctcgaactcctgacctctggtgatccacctgcctcgacctcccagagtgctgggattacaggcgtgagccaaccacttgggctgggctctgtactgtcctgaatgacgggctggcactgtcctgctccaggtgcatatggccgggcaggagggcagaggctcagggctggtgtgacctcttcttccagacccagtcccccttctctgcctcttccctctccaatcccagagacttggcccctgtacctcatcccaggcctgcccagggggacctaggggtcagaggcggatggcctggctcctggcccctagtcttgtgtctgctggggcttcctgctcgtagcaagggcctgtgggttccagctctgcagcccaagcctgggggattgcatgcctcactcatgggcttacagggcccaacccctgacgcctgcctggcccctggtgccagctggacctgtgtccctggctgaagccgggctggcgcccacccagtcagcctgcactggcgttggcagtgctgaggcagcatccgggcgtcctggtctgcccttgtccctacctgccttgtagaggcggctcagcgaagcccaggcttctggcccctgggacccctgggttggggcagagcagaggctgccctggccccaggctgctcctgcccagtgcctctgtgggaccaccctctgtggtgggctgggggggcctggaagtgaggccccgccctctccccgaagctgtgtgcggcactggccaggtggactggggccatggctggcttccttccaaggtttctggagcgggagccgcccaaaacctggacctggcctacccaaagtgcctgcactccttctgcactcctgggatgggtcccagaaccttctggaatgatctgtggctggtatgtgagcagccaggtctgctgccgggtgactgggcagcgcccttggatcctggtggggcctcagcctgcagcctgctctccccttttagggcggtaagtcggggaggctggcagggaagtggagaccgcaggacttgggggtgggtgggagggggtggcgagggggtgtgtttgctcctcctctcctgcctgctcccacccctggcccttaccttcttgggaactgtggtgattgccttctgtcaggtgtgttgaagcggccgtacccatggtggaggcctttgctcttcttgtggcgtgctggggtgggcaggtgggctgcagccccagcaccagcctgctccagctcccacaccgcccacagacctccctgtcctcatattctctgaccgcaggcctgcctgcctctgctctgctccgccccagaggggctgggttggacctggtgttcaaggccattcctatctgccccccagcccactgctggagccccaggcccctgcagcctgctccacactctgggttcccgggggaagcaggggtagagtggggcaggattcaggtgtagagggcctgtccccagcaggggtccccttgccccgggcccagggtcactggtacagatagcccatgtgcgaacctgggaggccttccgtgtgtgggcagagcagctgctgtgtcctggccattctccagccgcctgtctgtgggcactgtgggcaggtacctttgtgcagggccatggggcaggcagggcggggtctcctggccctgcctgacccttcacttgggaatgtcaagtgtggctcagctctgccttctctgccacctgggtcactaggcagactcctcactgccttagggggtccctgaagttacaggggatgggttttccctcccccagagcctggcttgctccttcgtttggggcctccccgtccgcctgcagtccccggatacagcccgcattcagtgagggctgtggggcagaggtctaggcttgagaggcacctggacctgtccctgaccttgttggactggcagtggggctggtgtgggggacagcggatgtcctcagagccggggggcagctcttgcctggcaggcagggcctggccgtgcactggttgggggctgccctgcactgcagaaaggacaggtgggctgtggcgtccgcaccacaccagggtgccctgctcatcgctctggccagagaacctgggcgcaggcaggggagggctgcaagggcggggcgtgagctaggcgttgggccgggtgtcggcgctgggtccagctgtccatccgactgtctgtccatggggtcccgtgtgaggttctaggccagctgccgtttgccttccgctgctgcggactctggagcgtgagaaccagcgcctggaggctgtcctggcgtggcggcgctctgagctggtcttctggcggtggatggtgaggaagcccgcgcatccctctcccggcatcccttcccacagcagcccccaggtggggcattcgggatcttcctgttttccagacaggaagaggggcttttagggaggccacagacctagtgtaggctctttctaggacttccactcgccttctggggaggctcactgctgcccccgccctcagctccatggccttctagagtgtggcctttgtgcctccctggacgtcacagttgctgagatggtggcatccagcccgctgtgggacctgggggactaccactgccctctttgccctctgtccctctgtccccttggcttggtgcacgctgtctcacttgggtctctgtaggtggatggacacggtcctgggcacctgtgccccggaggtgcctgctgcagcctcacagcccaccttcctgccctgggtccccgagcgcgggggtggcgagttggacctggtagtgcgggagctgcaggcactggaggaggagctgcgggaggctgcggagcgcaggcgggcggcctgggaggccaaggctggaggctgtggacgggggccagagtggagtgccgcgcggcgggcctctcgggaggctgtggaaaaggagctgggagctctacagcagtgctgggagcgagacggtggcccggcccagccccatgggccacaccggctggtgagacgagaggatggggcagcaggggaccgggacctgcgggcagctgtggtgatcaggacgctgaggagccaggaggcctgcctggaggcggtgctacgtcgactacagggacagtgtcggcaggaactggccaggctggtgggagcccgccctggtctcatctggatcccgccacctggacgctgagggcctgtcgacgggccctcgtgtgggaagcctgccctggcccagcctggctgggtcttggaggagcagattccaaggccaggtggccgcagggacgatgcagatgcagagcccacgtcacatgctcgctccaggggtggggctgggctgactctggccggatcccaggcctgtggctagcagcactggggacaggaatggctggtcccttgaggaggtcgtgacaggctcagcctggtggtctggaggggactcggaaataaattgtagcagctttcctgcc

SEQ ID NO: 890 - DNA, 916 bp, Homo sapiens
atgattgggctsaggttccagccggagcggtaactgggcgcaggtcccagccgccgcactaaacccggcccgtgcggtgattggacgcaggccccgggccgcggcggaggcgggcgatccgaaagaggctggtgctggctgcatggggaggcggcggcagcgggtggaccccgcggctggggcccgggccggggccctgcctgaggccatcgccgcgttgagtcggtcgctgccctcgggacccagccccgagatcttccgccgcgccaagttcgaccgtccggaggcgacctccgcgctctggcagctcctcttccgtgtgctctcgccactccctgcgggcaacgccttggcatcgctcgccctggaggtccaagcccgcttggtgaagtcagcactatgctcccagggctacccgaggctggcactggcacaactacctgaggatggctcgcagggcagtcgggagctgctgctggctctgtcctggctcttggcccgaggacctgtgcccgagcagatgctggcccaggcccgagtgcctctgggtgacgagatgactgtgtgccagtgtgaggccctggccagccctggcccacctgcaccccacatggaagcagagggtcctgtggatgtccgccatgtgcagtggctgatgggaaagctgcggttccggtggcgccagctggtgtccagtcagcaggagcagtgcgccctcctgaaccaagctgctgccggactctgggagcggtgagaaaccagcgccctggaagggctgttccctggccgtgggcggccgcctctggagcctgggtcctttctggggcggggtggaatgggaacacccggctcccctggggggcatccctggtaggccccccccggaaaggatggccccttgcctgtgccaagctcc

SEQ ID NO: 891 - DNA, 1534 bp, Homo sapiens
  misc_feature (1)..(1534): n = a, t, g, or c
ccgactcccctccccgaccccccgcctcccggagaggcgggaacggancggaaattcaaaaagcgtcgaccccgcgnccgtccccgagtccgcaggtcccagccgccgcactaaacccggcccgtgcggtgattggacgcaggccccgggccgcggcggaggcgggcgatccgaaagaggctggtgctggctgcatggggaggcggcggcagcgggtggaccccgcggctggggcccgggccggggccctgcctgaggccatcgccgcgttgagtcggtcgctgccctcgggacccagccccgagatcttccgccgcgccaagttcgaccgtccggaggcgacctccgcgctctggcagctcctcttccgtgtgctctcgccactccctgcgggcaacgccttggcatcgctcgccctggaggtccaagcccgcttggtgaagtcagcactatgctcccagggctacccgaggctggcactggcacaactacctgaggatggctcgcagggcagtcgggagctgctgctggctctgtcctggctcttggcccgaggacctgtgcccgagcagatgctggcccaggcccgagtgcctctgggtgacgagatgactgtgtgccccaactccccctgtaacaccccgcgcgcaggtcccccccgaaccaccgcccctcacgccatcccgcacagtatactgcaacccccaacactgtctatgcggtctccaagcccccgcatgcccccgcccatcggcctggcccccgcctcctgcgcccttgagccgatccctacttccccggagaagtggccgctattcgcccggcgcctctgcgctctccggaactcggacgtccccaacccacctctccgctagcccctccacctcttcgcccccacgttagctgcctacctgcgtcataacgctcttctcccccgtaacctagcgccgtctacgaagcagctatcccgccgccataatctgtgcccaacaatacaacccctcggagacgcggtccctccgatccgctgccacccagtttcgccaccttactccgactacgttatacccgacgatgtgcgcattcactagaacgaacgcgatacccatgcacatccctctacatagcgcatctccagtacacgccgacggatacttccgtctctcagatacgtancatgtcattctactgctcatccctgaggcatccgcgtccnctcttcccctccactatatacactatctctgcatctcccccgcttgcgcacccccacatcgagacgaccagaattcatactttcgtccacatcgatacagactacacgccgccccccgacgcacgctcgcgctcccgcgtgacaactccccctgctgctccccatagcctgtncaaccgccatttcagcccaccccgcccctatccgtaccgacagactacgtatattactcaggctcctacccgatgccaaatttcgacagtacggtcaactccaaaaccgtttcanaccattcggagcgacgtgaggcgtgcccac

SEQ ID NO: 892 - DNA, 1474 bp, Homo sapiens
  misc_feature (1)..(1474): n = a, t, g, or c
gcctgggtggcgattccggcacgagggtccagggaggactgagtttccctctcccgccgtcctcgcagccccgggaggtgcaggggcatcgcgggaacagccccggtgacacgctgcccggggtcttcacgaatgcccggaggcgccgctggccagaagccagcccgaccttccatccccgcagacagccccacgttcctcccggcccgcgtctttcggggccgcccgtgcaggcgcgggcggataaacggcggcgcggcggacgaggcagccgagaggcaccgccccgcctcccctcctctccgccctcccctctctctgcagttcccccgatagctacccgcgagcccccaccctcacagctcttcctgctagacctcttcttcctacgatcatccccctcttgacataccaagattacactacaatctaactgccgtgcctgcgcgccgatccccaccactagaacgagaatcttagactccctcgcccgcgcaccgaagatgcctataaccaccgcacccccccccatcgcatcaccttactcgttcgccgtgatcagctctctatttccgttttagcattctagcggtccaacgacgccgtcgaacgttcagtcagcagcgcagatgctcttcatccacgcccgccccacccactccagctcccccacccgaacccgacccccacgccttctccctgccgcccccgcgcatgcggggcccggcccttctctttcaactcattcagctaccgatgcgcgcgttgtcaactctcgaccgtacgatccccaacagtactcttttgcgcgtgagccacgcacaacggcttccgtgcatattaacctacgaggtacagtcttactcgctagtctctgtgtgtacctctccagtatacatattgcgccaatctctccagctactatcacaactgacttatactaacaatactatcttgctgcctcgtctcggtatagtaagatcactaatgcgtgcctcctcggcttatgtacatggctcatacgactcatatgtatccgtatcgactaacatccccgccgtctacctcatcgtaactagtacgtacaaggctacacatgccccattctccctaccccgtgactatcacatgcgaatcgcgaccgatccattgagcagattgttatatttcttgcagccaatgctcatcgcacttcgtgtctagtgcaacttctactgcntactcctgtgtgcgctccccgccgctgcaagacgcgtnactatacatatcatctctatatacatgaagnactccagctgcatacgtggagtgactcgactacgtcttcgaccgtatgtcagttctgcctgcctgagcgaagaagcaagcctgcgacctcatacatatctacccctctgaccgcccttactcacataacctctgntcaacatcgtagctcgacccacatcagagtatactctccgttttgctaacc

SEQ ID NO: 893 - DNA, 1337 bp, Homo sapiens
  misc_feature (1)..(1337): n = a, t, g, or c
gcctgggtggcgattccggcacgagggtccagggaggactgagtttccctctcccgccgtcctcgcagccccgggaggtgcaggggcatcgcgggaacagccccggtgacacgctgcccggggtcttcacgaatgcccggaggcgccgctggccagaagccagcccgaccttccatccccgcagacagccccacgttcctcccggcccgcgtctttcggggccgcccgtgcaggcgctccccgcaccggctggcgcacccttaggctggccacgggctcgctgtgcttagggactcgttccttctctcccccgcggtgcctgtgcgcctcttcaggcgtaatctacgccccgccgctgcacgactcttgccagctaccgccgcgctctggcctgtgcgtcgccccncttcagcgctaccaccgccccgcgcccgcactctatcacacccccttgtcgccgccgcgtcccccctttcattctctcaccctgtcccccccccgtcacccatccgccttctggcggttgtggggatgattctccgggggctgcccaccccttccaccggtttcgccctgtccctaccggtttgtaatgaggtggtcgatagctagctgtcttagctttctatcccggctcgccctcccgccgttcacgtatacttagattttcttctctcctttctctccactacgtccctcgttgcctcgtgttgtcgccgcccgattctcctgcgccccccggccccgtgaccgctccgaccaccacctatctcctcgcatccgcccccgcaggatcggaggccccgtcgcgttcttcacctcgctgacggcagccacaaccctgtcccgggcgctagccgtcccacgtcctcttccctactcgctcctcacgcccggcgcggcctcgcgtcatctcttggtaccagcgcgcctccgctctgcagtctagctattcctatacccgcctcacgcgtgtgtgaagatagcgatttttaccagcgagtcggccccgcgtgtcgtcgtgcagagcgnactgcatacctcgctgcacccgcagcttctntgcctgccgcgngcgtactcactcttgtgtatgctctgtctcacgccacgccgttcgtgcgttgtacacagccagactctagactaacctggatcgacgcgccgtacccgcgtgtcccgctgtcatcgaaagcgtcgtctcgntgtactcctccggaattcnctctcaccgccatccgcacggcatgtttcttatgctcaatctatactcacttctgttcctcgttctattcagctctcgcgttgtatcggtctgtgcgtgatcgtctcgcgtt

SEQ ID NO: 894 - DNA, 1335 bp, Homo sapiens
  misc_feature (1)..(1335): n = a, t, g, or c
gcctgggtggcgattccggcacgagggtccagggaggactgagtttccctctcccgccgtcctcgcagccccgggaggtgcaggggcatcgcgggaacagccccggtgacacgctgcccggggtcttcacgaatgcccggaggcgccgctggccagaagccagcccgaccttccatccccgcagacagccccacgttcctcccggcccgcgtctttcggggccgcccgtgcaggcgggcccggctcagcggcgcccgggcagcagctgcttccatgcgccggcttcctccggggctgctccgtggcggcggcagagggaaacgatgtcgcccgcctcgcagaaaccaccgccgctcccggcgcgaccaccccgcacccagcaacctagtcgccccccacacccttgagcaccccaagaacaacgcccacgccatcaccgcaatttatgcctcccgcccgcgcgccctactcccgctatcccccatcctcatgcctcccagccgcctaacccccccccccacctagtacgttttatgacccgccaatcatcccccgctctaccgccccgcccgtgatatttccacctactccgcgcccgccccccgcgccgcttttccctccccgtcccatccccgccccccctagaaaattatgcgacctctccccgccaccctcatcccttccccctctcctttatcccgccttacttccctccccctcccctattaccccccacccacccccctcacaccagccaccatacgccccccaaccctcgcccatattccacccctaacccatggcttaacacatgccgccccaaccttatcgcgatgtagcgccccgaaagccttcccaaacacaccacccgcaccccccgcacgccattaactccgcccaagataccatatctcccgccccgcccccggacgccaatgtccacccctgtcacattatgccccccgctgtgttaccgccgcctgtatacctttgacctcctcgtattcgttcgccctccgcgacccgccgcctcccccgcacttatttttattccgcccccccctccctcaccaccttattgtccgnggatctccccgctcgcgataggagtcccgcgcgccttcaacgcgtttgcgcggtaatagtgatcgcgaaggaggacgcccccccccgcctattattatttataccatcccccaccattccgccgcaccccccgcactggtaatattatgatgtccaccgccaccatatatgcggcaagataagagatcggcatgcatttcaacactatagacatcgacatatcccacatcactacattatgtgtcaccn

SEQ ID NO: 895 - DNA, 1090 bp, Homo sapiens
gcctgggtggcgattccggcacgagggtccagggaggactgagtttccctctcccgccgtcctcgcagccccgggaggtgcaggggcatcgcgggaacagccccggtgacacgctgcccggggtcttcacgaatgcccggaggcgccgctggccagaagccagcccgaccttccatccccgcagacagccccacgttcctcccggcccgcgtctttcggggccgcccgtgcaggcgggcccggctcagcggcgcccgggcagcagctgcttccatgcgccggcttcctccggggctgctccgtggcggcggcagagggaagcgctgccgcgggcgggcgaggatcgggagcgcctgaggaggctgccgcgggctccggctgcgcgttcggggcgggggagctgcccgggacttcgcgccaggggccaggggccggccgcgctggggtctgcgctgtgcggcgcggcgggctctgggcgcctcctggcggcccagcctggaaggcggcgcgatggggcgaggctcgtccgctccgacagccctgccaggagcccggaagtgggtccgcacgagacagaatagactacactcaaactccaggggaaccgttcattgggcttggacacgaaggcgggaccctgccgacgcagtgattggatgcatgtccggccagcgcggtgattggacctccgcgctctggcagctcctcttccgtgtgctctcgccactccctgcgggcaacgccttggcatcgctcgccctggagggcccagcccggctgggggaagcccagcactatggctccccaggcctaccccgaggcttgggcactggaaccaacttcccggacggagggcttccccagggacaatcggcaaactggcttcgtgggccccctggctgtgggcaattggggtcccagagaaccggggtgccccaacccaaagggccgggcccccgggtccccaaagtggcgttttgtggggggtgacaaaaaaacatctcggggggacaaaaagcgcgggggggccacttcgcctccgtccccgtgggcaccctctcgggtctagccccccaccaggggaggcacc

SEQ ID NO: 896 - DNA, 1706 bp, Homo sapiens
atgattgggctsaggttccagccggagcggtaactgggcgcaggtcccagccgccgcactaaacccggcccgtgcggtgattggacgcaggccccgggccgcggcggaggcgggcgatccgaaagaggctggtgctggctgcatggggaggcggcggcagcgggtggaccccgcggctggggcccgggccggggccctgcctgaggccatcgccgcgttgagtcggtcgctgccctcgggacccagccccgagatcttccgccgcgccaagttcgaccgtccggaggcgacctccgcgctctggcagctcctcttccgtgtgctctcgccactccctgcgggcaacgccttggcatcgctcgccctggaggtccaagcccgcttggtgaagtcagcactatgctcccagggctacccgaggctggcactggcacaactacctgaggatggctcgcagggcagtcgggagctgctgctggctctgtcctggctcttggcccgaggacctgtgcccgagcagatgctggcccaggcccgagtgcctctgggtgacgagatgactgtgtgccagtgtgaggccctggccagccctggcccacctgcaccccacatggaagcagagggtcctgtggatgtccgccatgtgcagtggctgatgggaaagctgcggttccggtggcgccagctggtgtccagtcagcaggagcagtgcgccctcctgagcaagatccacctgtacacacgcggctgccacagcgaccagagccttagccatctgtctgtcactgaagcagagatgctcagggacccagagggaggccagcagctgctgcggactctggagcgtgagaaccagcgcctggaggctgtcctggcgtggcggcgctctgagctggtcttctggcggtggatggacacggtcctgggcacctgtgccccggaggtgcctgctgcagcctcacagcccaccttcctgccctgggtccccgagcgcgggggtggcgagttggacctggtagtgcgggagctgcaggcactggaggaggagctgcgggaggctgcggagcgcaggcgggcggcctgggaggccaaggctggaggctgtggacgggggccagagtggagtgccgcgcggcgggcctctcgggaggctgtggaaaaggagctgggagctctacagcagtgctgggagcgagacggtggcccggcccagccccatgggccacaccggctggtgagacgagaggatggggcagcaggggaccgggacctgcgggcagctgtggtgatcaggacgctgaggagccaggaggcctgcctggaggcggtgctacgtcgactacagggacagtgtcggcaggaactggccaggctggtgggagcccgccctggtctcatctggatcccgccacctggacgctgagggcctgtcgacgggccctcgtgtgggaagcctgccctggcccagcctggctgggtcttggaggagcagattccaaggccaggtggccgcagggacgatgcagatgcagagcccacgtcacatgctcgctccaggggtggggctgggctgactctggccggatcccaggcctgtggctagcagcactggggacaggaatggctggtcccttgaggaggtcgtgacaggctcagcctggtggtctggaggggactcggaaataaattgtagcagctttcctgcc

SEQ ID NO: 897 - DNA, 2429 bp, Homo sapiens
atgattgggctsaggttccagccggagcggtaactgggcgcaggtcccagccgccgcactaaacccggcccgtgcggtgattggacgcaggccccgggccgcggcggaggcgggcgatccgaaagaggctggtgctggctgcatggggaggcggcggcagcgggtggaccccgcggctggggcccgggccggggccctgcctgaggccatcgccgcgttgagtcggtcgctgccctcgggacccagccccgagatcttccgccgcgccaagttcgaccgtccggaggcgacctccgcgctctggcagctcctcttccgtgtgctctcgccactccctgcgggcaacgccttggcatcgctcgccctggaggtccaagcccgcttggtgaagtcagcactatgctcccagggctacccgaggctggcactggcacaactacctgaggatggctcgcagggcagtcgggagctgctgctggctctgtcctggctcttggcccgaggacctgtgcccgagcagatgctggcccaggcccgagtgcctctgggtgacgagatgactgtgtgccagtgtgaggccctggccagccctggcccacctgcaccccacatggaagcagagggtcctgtggatgtccgccatgtgcagtggctgatgggaaagctgcggttccggtggcgccagctggtgtccagtcagcaggagcagtgcgccctcctgagcaagatccacctgtacacacgcggctgccacagcgaccagagccttagccatctgtctgtcactgaagcagagatgctcagggacccagagggaggccagcagctgctgcggactctggagcgtgagaaccagcgcctggaggctgtcctggcgtggcggcgctctgagctggtcttctggcggtggatggacacggtcctgggcacctgtgccccggaggtgcctgctgcagcctcacagcccaccttcctgccctgggtccccgagcgcgggggtggcgagttggacctggtagtgcgggagctgcaggcactggaggaggagctgcgggaggctgcggagcgcaggcgggcggcctgggaggccaaggctggaggctgtggacgggggccagagtggagtgccgcgcggcgggcctctcgggaggctgtggaaaaggagctgggagctctacagcagtgctgggagcgagacggtggcccggcccagccccatgggccacaccggctggtgagacgagaggatggggcagcaggggaccgggacctgcgggcagctgtggtgatcaggacgctgaggagccaggaggcctgcctggaggcggtgctacgtcgactacagggacagtgtcggcaggaactggccaggctggtgggagcccgccctggtctcatctggatcccgccacctggacgctgagggcctgtcgacgggccctcgtgtgggaagcctgccctggcccagcctggctgggtcttggaggagcagattccaaggccaggtggccgcagggacgatgcagatgcagagcccacgtcacatgctcgctccaggggtggggctgggctgactctggccggatcccaggcctgtggctagcagcactggggacaggaatggctggtcccttgaggaggtcgtgacaggctcagcctggtggtctggaggggactcggaaataaattgtagcagctttcctgccgctggccctccccctgccaccctgtcgggtttccctgtttgggggtgggagcgtggaggagcccctggcagtggtggccagtgtagggctggccaggtgctggaggacatgcataccccagcactggtgagtggcaggaccacggggaggtggcacaggcctccctggagcgggattatctcggcccgcccccttcatttgggctcccgctgtgggcctggcctgggctgtgagcacagctgcccccsctccggccatggctgtgcctggtgggtgcgccggatgggagcccggggctctgctccttcccgggagktggtgctccgggtggggaggcacagatggacagaggggctttgttccagaggctgctcagaaagctcagtcatccctgacaagagcatctgtgtccgggggacgtgcctcagctggcggaggagggtggctcatggacccccccgcccgcacaagagacagcaggtgggctgaggctcaagcctgctgcttgcgggtcccctttttggggctgcgatttgactgagtggggccatgggtgtgggcactcaggctgggcagcccgggcagcgttcctggcatgctctggggttctgctggtccactggccccatgggtggggccgcagggactatcgtaggcggggcgcgcgacgggagcctagactctaggggtgcaggctccccgcggtcccctcggtgtgtaggc

SEQ ID NO: 898 - DNA, 1893 bp, Homo sapiens
  misc_feature (1)..(1893): n = a, t, g, or c
atgattgggctsaggttccagccggagcggtaactgggcgcaggtcccagccgccgcactaaacccggcccgtgcggtgattggacgcaggccccgggccgcggcggaggcgggcgatccgaaagaggctggtgctggctgcatggggaggcggcggcagcgggtggaccccgcggctggggcccgggccggggccctgcctgaggccatcgccgcgttgagtcggtcgctgccctcgggacccagccccgagatcttccgccgcgccaagttcgaccgtccggaggcgacctccgcgctctggcagctcctcttccgtgtgctctcgccactccctgcgggcaacgccttggcatcgctcgccctggaggtccaagcccgcttggtgaagtcagcactatgctcccagggctacccgaggctggcactggcacaactacctgaggatggctcgcagggcagtcgggagctgctgctggctctgtcctggctcttggcccgaggacctgtgcccgagcagatgctggcccaggcccgagtgcctctgggtgacgagatgactgtgtgccagtgtgaggccctggccagccctggcccacctgcaccccacatggaagcagagggtcctgtggatgtccgccatgtgcagtggctgatgggaaagctgcggttccggtggcgccagctggtgtccagtcagcaggagcagtgcgccctcctgagcaagatccacctgtacacacgcggctgccacagcgaccagagccttagccatctgtctgtcactgaagcagagatgctcagggacccagagggaggccagcagctgctgcggactctggagcgtgagaaccagcgcctggaggctgtcctggcgtggcggcgctctgagctggtcttctggcggtggatggacacggtcctgggcacctgtgccccggaggtgcctgctgcagcctcacagcccaccttcctgccctgggtccccgagcgcgggggtggcgagttggacctggtagtgcgggagctgcaggcactggaggaggagctgcgggaggctgcggagcgcaggcgggcggcctgggaggccaaggctggaggctgtggacgggggccagagtggagtgccgcgcggcgggcctctcgggaggctgtggaaaaggagctgggagctctacagcagtgctgggagcgagacggtggcccggcccagccccatgggccacaccggctggtgagacgagaggatggggcagcaggggaccgggacctgcgggcagctgtggtgatcaggacgctgaggagccaggaggcctgcctggaggcggtgctacgtcgactacagggacagtgtcggcaggaactggccaggctggtgggagcccgccctggtctcatctggatcccgccacctggacgctgagggcctgtcgacgggccctcgtgtgggaagcctgccctggcccagcctggctgggtcttggaggagcagattccaaggccaggtggccgcagggacgatgcagatgcagagcccacgtcacatgctcgctccaggggtgggcgtgcggaaagacttggacgaatccaggcctgggggacagacccctggggaccagaatggtgtgagcagctagagagaggtcagaaaggtcacacggggggtctaggggaggcgagaaaattttgggaggaattctaggagggggacccctctggaaaaaaaaatatatatatcaaatataaaaaaagggcgggggaaatatatcagggaggagatgacacgttataagaggcagtaatgatataaaagagcggagaaaacgaggagatggatgggagacgtgtgaggaaaacacaaatattatgtgcttgtagtatgttgatacaggn

SEQ ID NO: 899 - DNA, 1590 bp, Homo sapiens
atgattgggctsaggttccagccggagcggtaactgggcgcaggtcccagccgccgcactaaacccggcccgtgcggtgattggacgcaggccccgggccgcggcggaggcgggcgatccgaaagaggctggtgctggctgcatggggaggcggcggcagcgggtggaccccgcggctggggcccgggccggggccctgcctgaggccatcgccgcgttgagtcggtcgctgccctcgggacccagccccgagatcttccgccgcgccaagttcgaccgtccggaggcgacctccgcgctctggcagctcctcttccgtgtgctctcgccactccctgcgggcaacgccttggcatcgctcgccctggaggtccaagcccgcttggtgaagtcagcactatgctcccagggctacccgaggctggcactggcacaactacctgaggatggctcgcagggcagtcgggagctgctgctggctctgtcctggctcttggcccgaggacctgtgcccgagcagatgctggcccaggcccgagtgcctctgggtgacgagatgactgtgtgccagtgtgaggccctggccagccctggcccacctgcaccccacatggaagcagagggtcctgtggatgtccgccatgtgcagtggctgatgggaaagctgcggttccggtggcgccagctggtgtccagtcagcaggagcagtgcgccctcctgagcaagatccacctgtacacacgcggctgccacagcgaccagagccttagccatctgtctgtcactgaagcagagatgctcagggacccagagggaggccagcagctgctgcggactctggagcgtgagaaccagcgcctggaggctgtcctggcgtggcggcgctctgagctggtcttctggcggtggatggacacggtcctgggcacctgtgccccggaggtgcctgctgcagcctcacagcccaccttcctgccctgggtccccgagcgcgggggtggcgagttggacctggtagtgcgggagctgcaggcactggaggaggagctgcgggaggctgcggagcgcaggcgggcggcctgggaggccaaggctggaggctgtggacgggggccagagtggagtgccgcgcggcgggcctctcgggaggctgtggaaaaggagctgggagctctacagcagtgctgggacacgaaaacagtgggccgcggcaaccccaagggccacacgcggcgtctggaacaccaacgctggcgcccgtgacaccgccactcaggcgcatgtgcgagaacagagcagatatggaaccaagagaggagccagagggaagggagaggagaaacatagaagcaggaggtcggacaaagccaacatcgtgggatagaaccaagcgattattgtaataagactcgacaaaaggtagagcgacgtcgatggaacggagacgacaaggcgacaggtaagacagcagcaggagcagaccgagcaatcgaagatgcgacgcgtcgaagagcaggacggactgacggtgatgggtgcgttgtctcttagtgctcgctgatgtggccgctagataggagaaaaaatga

SEQ ID NO: 900 - DNA, 1765 bp, Homo sapiens
atgattgggctsaggttccagccggagcggtaactgggcgcaggtcccagccgccgcactaaacccggcccgtgcggtgattggacgcaggccccgggccgcggcggaggcgggcgatccgaaagaggctggtgctggctgcatggggaggcggcggcagcgggtggaccccgcggctggggcccgggccggggccctgcctgaggccatcgccgcgttgagtcggtcgctgccctcgggacccagccccgagatcttccgccgcgccaagttcgaccgtccggaggcgacctccgcgctctggcagctcctcttccgtgtgctctcgccactccctgcgggcaacgccttggcatcgctcgccctggaggtccaagcccgcttggtgaagtcagcactatgctcccagggctacccgaggctggcactggcacaactacctgaggatggctcgcagggcagtcgggagctgctgctggctctgtcctggctcttggcccgaggacctgtgcccgagcagatgctggcccaggcccgagtgcctctgggtgacgagatgactgtgtgccagtgtgaggccctggccagccctggcccacctgcaccccacatggaagcagagggtcctgtggatgtccgccatgtgcagtggctgatgggaaagctgcggttccggtggcgccagctggtgtccagtcagcaggagcagtgcgccctcctgagcaagatccacctgtacacacgcggctgccacagcgaccagagccttagccatctgtctgtcactgaagcagagatgctcagggacccagagggaggccagcagctgctgcggactctggagcgtgagaaccagcgcctggaggctgtcctggcgtggcggcgctctgagctggtcttctggcggtggatggacacggtcctgggcacctgtgccccggaggtgcctgctgcagcctcacagcccaccttcctgccctgggtccccgagcgcgggggtggcgagttggacctggtagtgcgggagctgcaggcactggaggaggagctgcgggaggctgcggagcgcaggcgggcggcctgggaggccaaggctggaggctgtggacgggggccagagtggagtgccgcgcggcgggcctctcgggaggctgtggaaaaggagctgggagctctacagcagtgctgggagcgagacggtggcccggcccagccccatgggccacaccggctggtgagacgagaggatggggcagcaggggaccgggacctgcgggcagctgtggtgatcaggacgctgaggagccaggaggcctgcctggaggcggtgctacgtcgactacagggacagtgtcggcaggaactggccaggctggtgggagcccgccctggtctcatctggatcccgccacctggacgctgagggcctgtcgacgggccctcgtgtgggaagcctgccctggcccagcctggccttggccctttggaaggaacaccatttcccacgcgccagatggcccccagggtcaccgatgcctaatgccctagacccccccccacgaggggtgtgctctcagcggggagggcgcctgggtctgcatctccgggccgggactacccacacctcgggcgctttaaacacacctggggcgcggcgagacgtcctgtgcccccctctccgggtgggtctttgcacgcgcttcctcttctttgttcgttcgccgtgagtggacacgagtctataccgatcagccccgtatccccc

SEQ ID NO: 901 - DNA, 1180 bp, Homo sapiens
atgattgggctsaggttccagccggagcggtaactgggcgcaggtcccagccgccgcactaaacccggcccgtgcggtgattggacgcaggccccgggccgcggcggaggcgggcgatccgaaagaggctggtgctggctgcatggggaggcggcggcagcgggtggaccccgcggctggggcccgggccggggccctgcctgaggccatcgccgcgttgagtcggtcgctgccctcgggacccagccccgagatcttccgccgcgccaagttcgaccgtccggaggcgacctccgcgctctggcagctcctcttccgtgtgctctcgccactccctgcgggcaacgccttggcatcgctcgccctggaggtccaagcccgcttggtgaagtcagcactatgctcccagggctacccgaggctggcactggcacaactacctgaggatggctcgcagggcagtcgggagctgctgctggctctgtcctggctcttggcccgaggacctgtgcccgagcagatgctggcccaggcccgagtgcctctgggtgacgagatgactgtgtgccagtgtgaggccctggccagccctggcccacctgcaccccacatggaagcagagggtcctgtggatgtccgccatgtgcagtggctgatgggaaagctgcggttccggtggcgccagctggtgtccagtcagcaggagcagtgcgccctcctgagcaagatccacctgtacacacgcggctgccacagcgaccagagccttagccatctgtctgtcactgaagcagagatgctcagggacccagagggaggccagcagctgctgcggactctggagcgtgagaaccagcgcctggaggctgtcctggcgtggcggcgctctgagctggtcttctggcggtggatggacacggtcctgggcacctgtgccccggaggtgcctgctgcagcctcacagcccaccttcctgccctgggtccccgagcgcgggggtggcgagttggacctggtagtgcggcccttgcacccgtcggccatgggacggcaccgatgtgtgtgggcgtcccgcctccaccagggggggtcatagcaacagttcggggcgggggatgggcccgcctgcactatttattgaaacccttcccgcccctcctacccccctccgcgcgccatc

SEQ ID NO: 902 - DNA, 1104 bp, Homo sapiens
atgattgggctsaggttccagccggagcggtaactgggcgcaggtcccagccgccgcactaaacccggcccgtgcggtgattggacgcaggccccgggccgcggcggaggcgggcgatccgaaagaggctggtgctggctgcatggggaggcggcggcagcgggtggaccccgcggctggggcccgggccggggccctgcctgaggccatcgccgcgttgagtcggtcgctgccctcgggacccagccccgagatcttccgccgcgccaagttcgaccgtccggaggcgacctccgcgctctggcagctcctcttccgtgtgctctcgccactccctgcgggcaacgccttggcatcgctcgccctggaggtccaagcccgcttggtgaagtcagcactatgctcccagggctacccgaggctggcactggcacaactacctgaggatggctcgcagggcagtcgggagctgctgctggctctgtcctggctcttggcccgaggacctgtgcccgagcagatgctggcccaggcccgagtgcctctgggtgacgagatgactgtgtgccagtgtgaggccctggccagccctggcccacctgcaccccacatggaagcagagggtcctgtggatgtccgccatgtgcagtggctgatgggaaagctgcggttccggtggcgccagctggtgtccagtcagcaggagcagtgcgccctcctgagcaagatccacctgtacacacgcggctgccacagcgaccagagccttagccatctgtctgtcactgaagcagagatgctcagggacccagagggaggccagcagctgctgcggactctggagcgtgagaaccagcgcctggaggctgtcctggcgtggcggcgctctgagctggtcttctggcggtggatggacacggtcctgggcacctgtgccccggaggtgcctgctgcagcctcacagcccaccttcctgccctgggtccccgagcgcgggggtggcgagttggacctggtagtgcggagatgtggcccgtgtgagacacttggaggtgtgagacacgggccggccttgtggcccaggtgtggcggtgccggcccaat

SEQ ID NO: 903 - DNA, 1283 bp, Homo sapiens
atgattgggctsaggttccagccggagcggtaactgggcgcaggtcccagccgccgcactaaacccggcccgtgcggtgattggacgcaggccccgggccgcggcggaggcgggcgatccgaaagaggctggtgctggctgcatggggaggcggcggcagcgggtggaccccgcggctggggcccgggccggggccctgcctgaggccatcgccgcgttgagtcggtcgctgccctcgggacccagccccgagatcttccgccgcgccaagttcgaccgtccggaggcgacctccgcgctctggcagctcctcttccgtgtgctctcgccactccctgcgggcaacgccttggcatcgctcgccctggaggtccaagcccgcttggtgaagtcagcactatgctcccagggctacccgaggctggcactggcacaactacctgaggatggctcgcagggcagtcgggagctgctgctggctctgtcctggctcttggcccgaggacctgtgcccgagcagatgctggcccaggcccgagtgcctctgggtgacgagatgactgtgtgccagtgtgaggccctggccagccctggcccacctgcaccccacatggaagcagagggtcctgtggatgtccgccatgtgcagtggctgatgggaaagctgcggttccggtggcgccagctggtgtccagtcagcaggagcagtgcgccctcctgagcaagatccacctgtacacacgcggctgccacagcgaccagagccttagccatctgtctgtcactgaagcagagatgctcagggacccagagggaggccagcagctgctgcggactctggagcgtgagaaccagcgcctggaggctgtcctggcgtggcggcgctctgagctggtcttctggcggtggatggacacggtcctgggcacctgtgccccggaggtgcctgctgcagcctcacagcccaccttcctgccctgggtccccgagcgcgggggtggcgagttggacctggtagtgcgggagctgcaggcactggaggaggagctgcgggaggctgcggagcgcaggcgggcggcctgggaggccaaggctggaggctgtggacgggggccagagtggagtgccgcgcggcgggcctctcgggaggctgtggaaaaggagctgggagctctacagcagtgctgggagcaaaaaggggccggcaacccaggcaccggcgtgaccaagatcggcgggccgcctcgggctgtatacaccaaaccaggccggaggggataaa

SEQ ID NO: 904 - DNA, 1685 bp, Homo sapiens
gctgaacaaggcgcagagctgctccgccatctcccccacgcctcctgccaagttctgtggcgccgcggttccccacctcctgctcccatccccctggctcccgccgccctgtagctcggcagccctgccaggagcccggaagtgggtccgcacgagacagaatagactacactcaaactccaggggaaccgttcattgggcttggacacgaaggcgggaccctgccgacgcagtgattggatgcatgtccggccagcgcggtgattggacctccgcgctctggcagctcctcttccgtgtgctctcgccactccctgcgggcaacgccttggcatcgctcgccctggaggtccaagcccgcttggtgaagtcagcactatgctcccagggctacccgaggctggcactggcacaactacctgaggatggctcgcagggcagtcgggagctgctgctggctctgtcctggctcttggcccgaggacctgtgcccgagcagatgctggcccaggcccgagtgcctctgggtgacgagatgactgtgtgccagtgtgaggccctggccagccctggcccacctgcaccccacatggaagcagagggtcctgtggatgtccgccatgtgcagtggctgatgggaaagctgcggttccggtggcgccagctggtgtccagtcagcaggagcagtgcgccctcctgagcaagatccacctgtacacacgcggctgccacagcgaccagagccttagccatctgtctgtcactgaagcagagatgctcagggacccagagggaggccagcagctgctgcggactctggagcgtgagaaccagcgcctggaggctgtcctggcgtggcggcgctctgagctggtcttctggcggtggatggacacggtcctgggcacctgtgccccggaggtgcctgctgcagcctcacagcccaccttcctgccctgggtccccgagcgcgggggtggcgagttggacctggtagtgcgggagctgcaggcactggaggaggagctgcgggaggctgcggagcgcaggcgggcggcctgggaggccaaggctggaggctgtggacgggggccagagtggagtgccgcgcggcgggcctctcgggaggctgtggaaaaggagctgggagctctacagcagtgctgggagcgagacggtggcccggcccagccccatgggccacaccggctggtgagacgagaggatggggcagcaggggaccgggacctgcgggcagctgtggtgatcaggacgctgaggagccaggaggcctgcctggaggcggtgctacgtcgactacagggacagtgtcggcaggaactggccaggctggtgggagcccgccctggtctcatctggatcccgccacctggacgctgagggcctgtcgacgggccctcgtgtgggaagcctgccctggcccagcctggctgggtcttggaggagcagattccaaggccaggtggccgcagggacgatgcagatgcagagcccacgtcacatgctcgctccaggggtggggctgggctgactctggccggatcccaggcctgtggctagcagcactggggacaggaatggctggtcccttgaggaggtcgtgacaggctcagcctggtggtctggaggggactcggaaataaattgtagcagctttcctgcc

SEQ ID NO: 905 - DNA, 2101 bp, Homo sapiens
gcctgggtggcgattccggcacgagggtccagggaggactgagtttccctctcccgccgtcctcgcagccccgggaggtgcaggggcatcgcgggaacagccccggtgacacgctgcccggggtcttcacgaatgcccggaggcgccgctggccagaagccagcccgaccttccatccccgcagacagccccacgttcctcccggcccgcgtctttcggggccgcccgtgcaggcgggcccggctcagcggcgcccgggcagcagctgcttccatgcgccggcttcctccggggctgctccgtggcggcggcagagggaagcgctgccgcgggcgggcgaggatcgggagcgcctgaggaggctgccgcgggctccggctgcgcgttcggggcgggggagctgcccgggacttcgcgccaggggccaggggccggccgcgctggggtctgcgctgtgcggcgcggcgggctctgggcgcctcctggcggcccagcctggaaggcggcgcgatggggcgaggctcgtccgctccgacagccctgccaggagcccggaagtgggtccgcacgagacagaatagactacactcaaactccaggggaaccgttcattgggcttggacacgaaggcgggaccctgccgacgcagtgattggatgcatgtccggccagcgcggtgattggacctccgcgctctggcagctcctcttccgtgtgctctcgccactccctgcgggcaacgccttggcatcgctcgccctggaggtccaagcccgcttggtgaagtcagcactatgctcccagggctacccgaggctggcactggcacaactacctgaggatggctcgcagggcagtcgggagctgctgctggctctgtcctggctcttggcccgaggacctgtgcccgagcagatgctggcccaggcccgagtgcctctgggtgacgagatgactgtgtgccagtgtgaggccctggccagccctggcccacctgcaccccacatggaagcagagggtcctgtggatgtccgccatgtgcagtggctgatgggaaagctgcggttccggtggcgccagctggtgtccagtcagcaggagcagtgcgccctcctgagcaagatccacctgtacacacgcggctgccacagcgaccagagccttagccatctgtctgtcactgaagcagagatgctcagggacccagagggaggccagcagctgctgcggactctggagcgtgagaaccagcgcctggaggctgtcctggcgtggcggcgctctgagctggtcttctggcggtggatggacacggtcctgggcacctgtgccccggaggtgcctgctgcagcctcacagcccaccttcctgccctgggtccccgagcgcgggggtggcgagttggacctggtagtgcgggagctgcaggcactggaggaggagctgcgggaggctgcggagcgcaggcgggcggcctgggaggccaaggctggaggctgtggacgggggccagagtggagtgccgcgcggcgggcctctcgggaggctgtggaaaaggagctgggagctctacagcagtgctgggagcgagacggtggcccggcccagccccatgggccacaccggctggtgagacgagaggatggggcagcaggggaccgggacctgcgggcagctgtggtgatcaggacgctgaggagccaggaggcctgcctggaggcggtgctacgtcgactacagggacagtgtcggcaggaactggccaggctggtgggagcccgccctggtctcatctggatcccgccacctggacgctgagggcctgtcgacgggccctcgtgtgggaagcctgccctggcccagcctggctgggtcttggaggagcagattccaaggccaggtggccgcagggacgatgcagatgcagagcccacgtcacatgctcgctccaggggtggggctgggctgactctggccggatcccaggcctgtggctagcagcactggggacaggaatggctggtcccttgaggaggtcgtgacaggctcagcctggtggtctggaggggactcggaaataaattgtagcagctttcctgcc

SEQ ID NO: 906 - DNA, 1677 bp, Homo sapiens
acggagggcgtgcggggagggagaggaggggcttgctggggggggggccccgaggcggggccgggagggccgcctggaagaggaggtcgggggcgaaggaggccgagaagaaagccctgccaggagcccggaagtgggtccgcacgagacagaatagactacactcaaactccaggggaaccgttcattgggcttggacacgaaggcgggaccctgccgacgcagtgattggatgcatgtccggccagcgcggtgattggacctccgcgctctggcagctcctcttccgtgtgctctcgccactccctgcgggcaacgccttggcatcgctcgccctggaggtccaagcccgcttggtgaagtcagcactatgctcccagggctacccgaggctggcactggcacaactacctgaggatggctcgcagggcagtcgggagctgctgctggctctgtcctggctcttggcccgaggacctgtgcccgagcagatgctggcccaggcccgagtgcctctgggtgacgagatgactgtgtgccagtgtgaggccctggccagccctggcccacctgcaccccacatggaagcagagggtcctgtggatgtccgccatgtgcagtggctgatgggaaagctgcggttccggtggcgccagctggtgtccagtcagcaggagcagtgcgccctcctgagcaagatccacctgtacacacgcggctgccacagcgaccagagccttagccatctgtctgtcactgaagcagagatgctcagggacccagagggaggccagcagctgctgcggactctggagcgtgagaaccagcgcctggaggctgtcctggcgtggcggcgctctgagctggtcttctggcggtggatggacacggtcctgggcacctgtgccccggaggtgcctgctgcagcctcacagcccaccttcctgccctgggtccccgagcgcgggggtggcgagttggacctggtagtgcgggagctgcaggcactggaggaggagctgcgggaggctgcggagcgcaggcgggcggcctgggaggccaaggctggaggctgtggacgggggccagagtggagtgccgcgcggcgggcctctcgggaggctgtggaaaaggagctgggagctctacagcagtgctgggagcgagacggtggcccggcccagccccatgggccacaccggctggtgagacgagaggatggggcagcaggggaccgggacctgcgggcagctgtggtgatcaggacgctgaggagccaggaggcctgcctggaggcggtgctacgtcgactacagggacagtgtcggcaggaactggccaggctggtgggagcccgccctggtctcatctggatcccgccacctggacgctgagggcctgtcgacgggccctcgtgtgggaagcctgccctggcccagcctggctgggtcttggaggagcagattccaaggccaggtggccgcagggacgatgcagatgcagagcccacgtcacatgctcgctccaggggtggggctgggctgactctggccggatcccaggcctgtggctagcagcactggggacaggaatggctggtcccttgaggaggtcgtgacaggctcagcctggtggtctggaggggactcggaaataaattgtagcagctttcctgcc

SEQ ID NO: 907 - DNA, 1744 bp, Homo sapiens
gctgaacaaggcgcagagctgctccgccatctcccccacgcctcctgccaagttctgtggcgccgcggttccccacctcctgctcccatccccctggctcccgccgccctgtagctcggcaggtgcagtaggcgctccgaggaggaggccccttagcttcaagaaacccgcgtgggcggagccctgccaggagcccggaagtgggtccgcacgagacagaatagactacactcaaactccaggggaaccgttcattgggcttggacacgaaggcgggaccctgccgacgcagtgattggatgcatgtccggccagcgcggtgattggacctccgcgctctggcagctcctcttccgtgtgctctcgccactccctgcgggcaacgccttggcatcgctcgccctggaggtccaagcccgcttggtgaagtcagcactatgctcccagggctacccgaggctggcactggcacaactacctgaggatggctcgcagggcagtcgggagctgctgctggctctgtcctggctcttggcccgaggacctgtgcccgagcagatgctggcccaggcccgagtgcctctgggtgacgagatgactgtgtgccagtgtgaggccctggccagccctggcccacctgcaccccacatggaagcagagggtcctgtggatgtccgccatgtgcagtggctgatgggaaagctgcggttccggtggcgccagctggtgtccagtcagcaggagcagtgcgccctcctgagcaagatccacctgtacacacgcggctgccacagcgaccagagccttagccatctgtctgtcactgaagcagagatgctcagggacccagagggaggccagcagctgctgcggactctggagcgtgagaaccagcgcctggaggctgtcctggcgtggcggcgctctgagctggtcttctggcggtggatggacacggtcctgggcacctgtgccccggaggtgcctgctgcagcctcacagcccaccttcctgccctgggtccccgagcgcgggggtggcgagttggacctggtagtgcgggagctgcaggcactggaggaggagctgcgggaggctgcggagcgcaggcgggcggcctgggaggccaaggctggaggctgtggacgggggccagagtggagtgccgcgcggcgggcctctcgggaggctgtggaaaaggagctgggagctctacagcagtgctgggagcgagacggtggcccggcccagccccatgggccacaccggctggtgagacgagaggatggggcagcaggggaccgggacctgcgggcagctgtggtgatcaggacgctgaggagccaggaggcctgcctggaggcggtgctacgtcgactacagggacagtgtcggcaggaactggccaggctggtgggagcccgccctggtctcatctggatcccgccacctggacgctgagggcctgtcgacgggccctcgtgtgggaagcctgccctggcccagcctggctgggtcttggaggagcagattccaaggccaggtggccgcagggacgatgcagatgcagagcccacgtcacatgctcgctccaggggtggggctgggctgactctggccggatcccaggcctgtggctagcagcactggggacaggaatggctggtcccttgaggaggtcgtgacaggctcagcctggtggtctggaggggactcggaaataaattgtagcagctttcctgcc

SEQ ID NO: 908 - DNA, 1806 bp, Homo sapiens
atgattgggctsaggttccagccggagcggtaactgggcgcaggtcccagccgccgcactaaacccggcccgtgcggtgattggacgcaggccccgggccgcggcggaggcgggcgatccgaaagaggctggtgctggctgcatggggaggcggcggcagcgggtggaccccgcggctggggcccgggccggggccctgcctgaggccatcgccgcgttgagtcggtcgctgccctcgggacccagccccgagatcttccgccgcgccaagttcgaccgtccggaggcggtgacgctctcgcggagggcaggcgggccgggtggggtcccgggccctcgcagggagttgggccggctccgctgacctgcccgctttttattttccgcagacctccgcgctctggcagctcctcttccgtgtgctctcgccactccctgcgggcaacgccttggcatcgctcgccctggaggtccaagcccgcttggtgaagtcagcactatgctcccagggctacccgaggctggcactggcacaactacctgaggatggctcgcagggcagtcgggagctgctgctggctctgtcctggctcttggcccgaggacctgtgcccgagcagatgctggcccaggcccgagtgcctctgggtgacgagatgactgtgtgccagtgtgaggccctggccagccctggcccacctgcaccccacatggaagcagagggtcctgtggatgtccgccatgtgcagtggctgatgggaaagctgcggttccggtggcgccagctggtgtccagtcagcaggagcagtgcgccctcctgagcaagatccacctgtacacacgcggctgccacagcgaccagagccttagccatctgtctgtcactgaagcagagatgctcagggacccagagggaggccagcagctgctgcggactctggagcgtgagaaccagcgcctggaggctgtcctggcgtggcggcgctctgagctggtcttctggcggtggatggacacggtcctgggcacctgtgccccggaggtgcctgctgcagcctcacagcccaccttcctgccctgggtccccgagcgcgggggtggcgagttggacctggtagtgcgggagctgcaggcactggaggaggagctgcgggaggctgcggagcgcaggcgggcggcctgggaggccaaggctggaggctgtggacgggggccagagtggagtgccgcgcggcgggcctctcgggaggctgtggaaaaggagctgggagctctacagcagtgctgggagcgagacggtggcccggcccagccccatgggccacaccggctggtgagacgagaggatggggcagcaggggaccgggacctgcgggcagctgtggtgatcaggacgctgaggagccaggaggcctgcctggaggcggtgctacgtcgactacagggacagtgtcggcaggaactggccaggctggtgggagcccgccctggtctcatctggatcccgccacctggacgctgagggcctgtcgacgggccctcgtgtgggaagcctgccctggcccagcctggctgggtcttggaggagcagattccaaggccaggtggccgcagggacgatgcagatgcagagcccacgtcacatgctcgctccaggggtggggctgggctgactctggccggatcccaggcctgtggctagcagcactggggacaggaatggctggtcccttgaggaggtcgtgacaggctcagcctggtggtctggaggggactcggaaataaattgtagcagctttcctgcc

SEQ ID NO: 909 - DNA, 1545 bp, Homo sapiens
atgattgggctsaggttccagccggagcggtaactgggcgcaggtcccagccgccgcactaaacccggcccgtgcggtgattggacgcaggccccgggccgcggcggaggcgggcgatccgaaagaggacctccgcgctctggcagctcctcttccgtgtgctctcgccactccctgcgggcaacgccttggcatcgctcgccctggaggtccaagcccgcttggtgaagtcagcactatgctcccagggctacccgaggctggcactggcacaactacctgaggatggctcgcagggcagtcgggagctgctgctggctctgtcctggctcttggcccgaggacctgtgcccgagcagatgctggcccaggcccgagtgcctctgggtgacgagatgactgtgtgccagtgtgaggccctggccagccctggcccacctgcaccccacatggaagcagagggtcctgtggatgtccgccatgtgcagtggctgatgggaaagctgcggttccggtggcgccagctggtgtccagtcagcaggagcagtgcgccctcctgagcaagatccacctgtacacacgcggctgccacagcgaccagagccttagccatctgtctgtcactgaagcagagatgctcagggacccagagggaggccagcagctgctgcggactctggagcgtgagaaccagcgcctggaggctgtcctggcgtggcggcgctctgagctggtcttctggcggtggatggacacggtcctgggcacctgtgccccggaggtgcctgctgcagcctcacagcccaccttcctgccctgggtccccgagcgcgggggtggcgagttggacctggtagtgcgggagctgcaggcactggaggaggagctgcgggaggctgcggagcgcaggcgggcggcctgggaggccaaggctggaggctgtggacgggggccagagtggagtgccgcgcggcgggcctctcgggaggctgtggaaaaggagctgggagctctacagcagtgctgggagcgagacggtggcccggcccagccccatgggccacaccggctggtgagacgagaggatggggcagcaggggaccgggacctgcgggcagctgtggtgatcaggacgctgaggagccaggaggcctgcctggaggcggtgctacgtcgactacagggacagtgtcggcaggaactggccaggctggtgggagcccgccctggtctcatctggatcccgccacctggacgctgagggcctgtcgacgggccctcgtgtgggaagcctgccctggcccagcctggctgggtcttggaggagcagattccaaggccaggtggccgcagggacgatgcagatgcagagcccacgtcacatgctcgctccaggggtggggctgggctgactctggccggatcccaggcctgtggctagcagcactggggacaggaatggctggtcccttgaggaggtcgtgacaggctcagcctggtggtctggaggggactcggaaataaattgtagcagctttcctgcc

SEQ ID NO: 910 - DNA, 2790 bp, Homo sapiens
atgattgggctsaggttccagccggagcggtaactgggcgcaggtcccagccgccgcactaaacccggcccgtgcggtgattggacgcaggccccgggccgcggcggaggcgggcgatccgaaagaggctggtgctggctgcatggggaggcggcggcagcgggtggaccccgcggctggggcccgggccggggccctgcctgaggccatcgccgcgttgagtcggtcgctgccctcgggacccagccccgagatcttccgccgcgccaagttcgaccgtccggaggcgacctccgcgctctggcagctcctcttccgtgtgctctcgccactccctgcgggcaacgccttggcatcgctcgccctggaggtccaagcccgcttggtgaagtcagcactatgctcccagggctacccgaggctggcactggcacaactacctgaggatggctcgcagggcagtcgggagctgctgctggctctgtcctggctcttggcccgaggacctgtgcccgagcagatgctggcccaggcccgagtgcctctgggtgacgagatgactgtgtgccagtgtgaggccctggccagccctggcccacctgcaccccacatggaagcagagggtcctgtggatgtccgccatgtgcagtggctgatgggaaagctgcggttccggtggcgccagctggtgtccagtcagcaggagcagtgcgccctcctgagcaagatccacctgtacacacgcggctgccacagcgaccagagccttagccatctgtctgtcactgaagcagagatgctcagggacccagagggaggccagcagctgctgcggactctggagcgtgagaaccagcgcctggaggctgtcctggcgtggcggcgctctgagctggtcttctggcggtggatggtgaggaagcccgcgcatccctctcccggcatcccttcccacagcagcccccaggtggggcattcgggatcttcctgttttccagacaggaagaggggcttttagggaggccacagacctagtgtaggctctttctaggacttccactcgccttctggggaggctcactgctgcccccgccctcagctccatggccttctagagtgtggcctttgtgcctccctggacgtcacagttgctgagatggtggcatccagcccgctgtgggacctgggggactaccactgccctctttgccctctgtccctctgtccccttggcttggtgcacgctgtctcacttgggtctctgtaggtggatggacacggtcctgggcacctgtgccccggaggtgcctgctgcagcctcacagcccaccttcctgccctgggtccccgagcgcgggggtggcgagttggacctggtagtgcgggagctgcaggcactggaggaggagctgcgggaggctgcggagcgcaggcgggcggcctgggaggccaaggctggaggctgtggacgggggccagagtggagtgccgcgcggcgggcctctcgggaggctgtggaaaaggagctgggagctctacagcagtgctgggagcgagacggtggcccggcccagccccatgggccacaccggctggtgagacgagaggatggggcagcaggggaccgggacctgcgggcagctgtggtgatcaggacgctgaggagccaggaggcctgcctggaggcggtgctacgtcgactacagggacagtgtcggcaggaactggccaggctggtgggagcccgccctggtctcatctggatcccgccacctggacgctgagggcctgtcgacgggccctcgtgtgggaagcctgccctggcccagcctggctgggtcttggaggagcagattccaaggccaggtggccgcagggacgatgcagatgcagagcccacgtcacatgctcgctccaggggtggggctgggctgactctggccggatcccaggcctgtggctagcagcactggggacaggaatggctggtcccttgaggaggtcgtgacaggctcagcctggtggtctggaggggactcggaaataaattgtagcagctttcctgccgctggccctccccctgccaccctgtcgggtttccctgtttgggggtgggagcgtggaggagcccctggcagtggtggccagtgtagggctggccaggtgctggaggacatgcataccccagcactggtgagtggcaggaccacggggaggtggcacaggcctccctggagcgggattatctcggcccgcccccttcatttgggctcccgctgtgggcctggcctgggctgtgagcacagctgcccccsctccggccatggctgtgcctggtgggtgcgccggatgggagcccggggctctgctccttcccgggagktggtgctccgggtggggaggcacagatggacagaggggctttgttccagaggctgctcagaaagctcagtcatccctgacaagagcatctgtgtccgggggacgtgcctcagctggcggaggagggtggctcatggacccccccgcccgcacaagagacagcaggtgggctgaggctcaagcctgctgcttgcgggtcccctttttggggctgcgatttgactgagtggggccatgggtgtgggcactcaggctgggcagcccgggcagcgttcctggcatgctctggggttctgctggtccactggccccatgggtggggccgcagggactatcgtaggcggggcgcgcgacgggagcctagactctaggggtgcaggctccccgcggtcccctcggtgtgtaggc

SEQ ID NO: 911 - DNA, 1713 bp, Homo sapiens
atgattgggctsaggttccagccggagcggtaactgggcgcaggtcccagccgccgcactaaacccggcccgtgcggtgattggacgcaggccccgggccgcggcggaggcgggcgatccgaaagaggctggtgctggctgcatggggaggcggcggcagcgggtggaccccgcggctggggcccgggccggggccctgcctgaggccatcgccgcgttgagtcggtcgctgccctcgggacccagccccgagatcttccgccgcgccaagttcgaccgtccggaggcgacctccgcgctctggcagctcctcttccgtgtgctctcgccactccctgcgggcaacgccttggcatcgctcgccctggaggtccaagcccgcttggtgaagtcagcactatgctcccagggctacccgaggctggcactggcacaactacctgaggatggctcgcagggcagtcgggagctgctgctggctctgtcctggctcttggcccgaggacctgtgcccgagcagatgctggcccaggcccgagtgcctctgggtgacgagatgactgtgtgccagtgtgaggccctggccagccctggcccacctgcaccccacatggaagcagagggtcctgtggatgtccgccatgtgcagtggctgatgggaaagctgcggttccggtggcgccagctggtgtccagtcagcaggagcagtgcgccctcctgagcaagatccacctgtacacacgcggctgccacagcgaccagagccttagccatctgtctgtcactgaagcagagatgctcagggacccagagggaggccagcagctgctgcggactctggagcgtgagaaccagcgcctggaggctgtcctggcgtggcggcgctctgagctggtcttctggcgaatgaaccggccttgagctgtgcccggacggcggccgctccaccatagccggccacgggctcaacaacatagagtacacacgacaacgagtgcaacgcaacaggagagacaagtagcgttagtgtcgtcgccccgagtgtcacaccaccgaccagaaaccacaacaacgccagacactacccaacgacacgacaaaatagaagcaagcaacacaacagacagacaagaccacgactacaaacgacacataacaaagagaagaacacaaccaaccaaataagaacaacagacaccacagacacacaccatcacaaacgaatccaagaacaaccagcaacacaagaagacaaaccagaccaaagcaccacaccaccacgaacacacacaaacagcgggagcgggggcgcgcgaggacgaagcgctacacacggagcggggtcgtgacggtcggcagtcgcggacagcgcaggacggagagtgaggacagagaagcggcaccagtcagaagagcaggacgaaggcgggactgagagcgacgaaggacgggcacgggagcaggacggccggagccgcgcagagaaggcgcgcggcgctcggcgagggagagagaaggcagcggcagaggagcgcggacccgcgcgtggccgacacggcgcccccgcgggccgcagcacgcgacgccgaccaggcagcgcggtgcgaacgaggcgaccggagaccgcagaccggacagacacgctggcgcaggcgcgcggcgaccaggggagagcgagacacgcagaggggccagacccggccggcgcgccg

SEQ ID NO: 912 - DNA, 1600 bp, Homo sapiens
atgattgggctsaggttccagccggagcggtaactgggcgcaggtcccagccgccgcactaaacccggcccgtgcggtgattggacgcaggccccgggccgcggcggaggcgggcgatccgaaagaggctggtgctggctgcatggggaggcggcggcagcgggtggaccccgcggctggggcccgggccggggccctgcctgaggccatcgccgcgttgagtcggtcgctgccctcgggacccagccccgagatcttccgccgcgccaagttcgaccgtccggaggcgacctccgcgctctggcagctcctcttccgtgtgctctcgccactccctgcgggcaacgccttggcatcgctcgccctggaggtccaagcccgcttggtgaagtcagcactatgctcccagggctacccgaggctggcactggcacaactacctgaggatggctcgcagggcagtcgggagctgctgctggctctgtcctggctcttggcccgaggacctgtgcccgagcagatgctggcccaggcccgagtgcctctgggtgacgagatgactgtgtgccagtgtgaggccctggccagccctggcccacctgcaccccacatggaagcagagggtcctgtggatgtccgccatgtgcagtggctgatgggaaagctgcggttccggtggcgccagctggtgtccagtcagcaggagcagtgcgccctcctgagcaagatccacctgtacacacgcggctgccacagcgaccagagccttagccatctgtctgtcactgaagcagagatgctcagggacccagagggaggccagcagctgctgcggactctggagcgtgagaaccagcgcctggaggctgtcctggcgtggcggcgctctgagctggtcttctggcagcgaggacttggacacaggaacacatgagcaacacatgatgagacccgggaaggatgacatgaatggaagacatcacaaagagcaaacaaacacatgcctagaagtcacgaagagcagcgggggaagtgagaagagatggaacaaggaaagtgcagggaagctgcacggacacatggcaggaggaggcggcagagaaggatgcggacaacggcaagggcgagacgggcgccaaggaagggccaagggaaggagaggccagaagagcagagaagacacaaaaagggaagacacgcaggaaggagccaaacgggaagggctagcgacacacgaggagcaggaggagaacgaaggacagcggcggggcaaccaaggaagagggggagcgagcgccacacagaaggagcaaagcgggagaacaccgaggggagtggaggacaggggcacccgggacagtcggacagaggaaacaggcgcggggagaaggaggcgcagggggaccagagaagagagagggaggagaagcccggagcgacacaggccaaagcagcgcggaccaggggacgggaggagaggagagagaagggggcggggagaagcgcgcaggagcaggcaggggacgggggcgaaggaaacaaagggggaagaggagacgaaagagcggcgggggaaaggcgagaaagcaagaaaacggag

SEQ ID NO: 913 - DNA, 1913 bp, Homo sapiens
atgattgggctsaggttccagccggagcggtaactgggcgcaggtcccagccgccgcactaaacccggcccgtgcggtgattggacgcaggccccgggccgcggcggaggcgggcgatccgaaagaggctggtgctggctgcatggggaggcggcggcagcgggtggaccccgcggctggggcccgggccggggccctgcctgaggccatcgccgcgttgagtcggtcgctgccctcgggacccagccccgagatcttccgccgcgccaagttcgaccgtccggaggcgacctccgcgctctggcagctcctcttccgtgtgctctcgccactccctgcgggcaacgccttggcatcgctcgccctggaggtccaagcccgcttggtgaagtcagcactatgctcccagggctacccgaggctggcactggcacaactacctgaggatggctcgcagggcagtcgggagctgctgctggctctgtcctggctcttggcccgaggacctgtgcccgagcagatgctggcccaggcccgagtgcctctgggtgacgagatgactgtgtgccagtgtgaggccctggccagccctggcccacctgcaccccacatggaagcagagggtcctgtggatgtccgccatgtgcagtggctgatgggaaagctgcggttccggtggcgccagctggtgtccagtcagcaggagcagtgcgccctcctgagcaagatccacctgtacacacgcggctgccacagcgaccagagccttagccatctgtctgtcactgaagcagagatgctcagggacccagagggaggccagcaggtttctggagcgggagccgcccaaaacctggacctggcctacccaaagtgcctgcactccttctgcactcctgggatgggtcccagaaccttctggaatgatctgtggctggtatgtgagcagccaggtctgctgccgggtgactgggcagcgcccttggatcctggtggggcctcagcctgcagcctgctctccccttttagggcgctgctgcggactctggagcgtgagaaccagcgcctggaggctgtcctggcgtggcggcgctctgagctggtcttctggcggtggatggacacggtcctgggcacctgtgccccggaggtgcctgctgcagcctcacagcccaccttcctgccctgggtccccgagcgcgggggtggcgagttggacctggtagtgcgggagctgcaggcactggaggaggagctgcgggaggctgcggagcgcaggcgggcggcctgggaggccaaggctggaggctgtggacgggggccagagtggagtgccgcgcggcgggcctctcgggaggctgtggaaaaggagctgggagctctacagcagtgctgggagcgagacggtggcccggcccagccccatgggccacaccggctggtgagacgagaggatggggcagcaggggaccgggacctgcgggcagctgtggtgatcaggacgctgaggagccaggaggcctgcctggaggcggtgctacgtcgactacagggacagtgtcggcaggaactggccaggctggtgggagcccgccctggtctcatctggatcccgccacctggacgctgagggcctgtcgacgggccctcgtgtgggaagcctgccctggcccagcctggctgggtcttggaggagcagattccaaggccaggtggccgcagggacgatgcagatgcagagcccacgtcacatgctcgctccaggggtggggctgggctgactctggccggatcccaggcctgtggctagcagcactggggacaggaatggctggtcccttgaggaggtcgtgacaggctcagcctggtggtctggaggggactcggaaataaattgtagcagctttcctgcc

SEQ ID NO: 914 - DNA, 1884 bp, Homo sapiens
acggagggcgtgcggggagggagaggaggggcttgctggggggggggccccgaggcggggccgggagggccgcctggaagaggaggtcgggggcgaaggaggccgagaagaaagccctgccaggagcccggaagtgggtccgcacgagacagaatagactacactcaaactccaggggaaccgttcattgggcttggacacgaaggcgggaccctgccgacgcagtgattggatgcatgtccggccagcgcggtgattggacctccgcgctctggcagctcctcttccgtgtgctctcgccactccctgcgggcaacgccttggcatcgctcgccctggaggtccaagcccgcttggtgaagtcagcactatgctcccagggctacccgaggctggcactggcacaactacctgaggatggctcgcagggcagtcgggagctgctgctggctctgtcctggctcttggcccgaggacctgtgcccgagcagatgctggcccaggcccgagtgcctctgggtgacgagatgactgtgtgccagtgtgaggccctggccagccctggcccacctgcaccccacatggaagcagagggtcctgtggatgtccgccatgtgcagtggctgatgggaaagctgcggttccggtggcgccagctggtgtccagtcagcaggagcagtgcgccctcctgagcaagatccacctgtacacacgcggctgccacagcgaccagagccttagccatctgtctgtcactgaagcagagatgctcagggacccagagggaggccagcaggtttctggagcgggagccgcccaaaacctggacctggcctacccaaagtgcctgcactccttctgcactcctgggatgggtcccagaaccttctggaatgatctgtggctggtatgtgagcagccaggtctgctgccgggtgactgggcagcgcccttggatcctggtggggcctcagcctgcagcctgctctccccttttagggcgctgctgcggactctggagcgtgagaaccagcgcctggaggctgtcctggcgtggcggcgctctgagctggtcttctggcggtggatggacacggtcctgggcacctgtgccccggaggtgcctgctgcagcctcacagcccaccttcctgccctgggtccccgagcgcgggggtggcgagttggacctggtagtgcgggagctgcaggcactggaggaggagctgcgggaggctgcggagcgcaggcgggcggcctgggaggccaaggctggaggctgtggacgggggccagagtggagtgccgcgcggcgggcctctcgggaggctgtggaaaaggagctgggagctctacagcagtgctgggagcgagacggtggcccggcccagccccatgggccacaccggctggtgagacgagaggatggggcagcaggggaccgggacctgcgggcagctgtggtgatcaggacgctgaggagccaggaggcctgcctggaggcggtgctacgtcgactacagggacagtgtcggcaggaactggccaggctggtgggagcccgccctggtctcatctggatcccgccacctggacgctgagggcctgtcgacgggccctcgtgtgggaagcctgccctggcccagcctggctgggtcttggaggagcagattccaaggccaggtggccgcagggacgatgcagatgcagagcccacgtcacatgctcgctccaggggtggggctgggctgactctggccggatcccaggcctgtggctagcagcactggggacaggaatggctggtcccttgaggaggtcgtgacaggctcagcctggtggtctggaggggactcggaaataaattgtagcagctttcctgcc

SEQ ID NO: 915 - DNA, 1013 bp, Homo sapiens
atgattgggctsaggttccagccggagcggtaactgggcgcaggtcccagccgccgcactaaacccggcccgtgcggtgattggacgcaggccccgggccgcggcggaggcgggcgatccgaaagaggctggtgctggctgcatggggaggcggcggcagcgggtggaccccgcggctggggcccgggccggggccctgcctgaggccatcgccgcgttgagtcggtcgctgccctcgggacccagccccgagatcttccgccgcgccaagttcgaccgtccggaggcgacctccgcgctctggcagctcctcttccgtgtgctctcgccactccctgcgggcaacgccttggcatcgctcgccctggaggtccaagcccgcttggtgaagtcagcactatgctcccagggctacccgaggctggcactggcacaactacctgaggatggctcgcagggcagtcgggagctgctgctggctctgtcctggctcttggcccgaggacctgtgcccgagcagatgctggcccaggcccgagtgcctctgggtgacgagatgactgtgtgccagtgtgaggccctggccagccctggcccacctgcaccccacatggaagcagagggtcctgtggatgtccgccatgtgcagtggctgatgggaaagctgcggttccggtggcgccagctggtgtccagtcagcaggagcagtgcgccctcctgagcaagatccacctgtacacacgcggctgccacagcgaccagagccttagccatctgtctgtcactgaagcagagatgctcagggacccagagggaggccagcagctgtgcggacctggaacgtgaaaacaggactgagtgctgcgttgggggccaacaggctctgcgagataaagccggcaccgtgccgagtgcttcgctcaccacctctgcggaccaaaggggatactatagaccccacaaagaaagagaaaaggagcaacagagcaaagagcaaaccgcaaatgcacga

SEQ ID NO: 916 - DNA, 1603 bp, Homo sapiens
atgattgggctsaggttccagccggagcggtaactgggcgcaggtcccagccgccgcactaaacccggcccgtgcggtgattggacgcaggccccgggccgcggcggaggcgggcgatccgaaagaggctggtgctggctgcatggggaggcggcggcagcgggtggaccccgcggctggggcccgggccggggccctgcctgaggccatcgccgcgttgagtcggtcgctgccctcgggacccagccccgagatcttccgccgcgccaagttcgaccgtccggaggcgacctccgcgctctggcagctcctcttccgtgtgctctcgccactccctgcgggcaacgccttggcatcgctcgccctggaggtccaagcccgcttggtgaagtcagcactatgctcccagggctacccgaggctggcactggcacaactacctgaggatggctcgcagggcagtcgggagctgctgctggctctgtcctggctcttggcccgaggacctgtgcccgagcagatgctggcccaggcccgagtgcctctgggtgacgagatgactgtgtgccagtgtgaggccctggccagccctggcccacctgcaccccacatggaagcagagggtcctgtggatgtccgccatgtgcagtggctgatgggaaagctgcggttccggtggcgccagctggtgtccagtcagcaggagcagtgcgccctcctgagctgctgcggactctggagcgtgagaaccagcgcctggaggctgtcctggcgtggcggcgctctgagctggtcttctggcggtggatggacacggtcctgggcacctgtgccccggaggtgcctgctgcagcctcacagcccaccttcctgccctgggtccccgagcgcgggggtggcgagttggacctggtagtgcgggagctgcaggcactggaggaggagctgcgggaggctgcggagcgcaggcgggcggcctgggaggccaaggctggaggctgtggacgggggccagagtggagtgccgcgcggcgggcctctcgggaggctgtggaaaaggagctgggagctctacagcagtgctgggagcgagacggtggcccggcccagccccatgggccacaccggctggtgagacgagaggatggggcagcaggggaccgggacctgcgggcagctgtggtgatcaggacgctgaggagccaggaggcctgcctggaggcggtgctacgtcgactacagggacagtgtcggcaggaactggccaggctggtgggagcccgccctggtctcatctggatcccgccacctggacgctgagggcctgtcgacgggccctcgtgtgggaagcctgccctggcccagcctggctgggtcttggaggagcagattccaaggccaggtggccgcagggacgatgcagatgcagagcccacgtcacatgctcgctccaggggtggggctgggctgactctggccggatcccaggcctgtggctagcagcactggggacaggaatggctggtcccttgaggaggtcgtgacaggctcagcctggtggtctggaggggactcggaaataaattgtagcagctttcctgcc

SEQ ID NO: 917 - DNA, 1512 bp, Homo sapiens
atgattgggctsaggttccagccggagcggtaactgggcgcaggtcccagccgccgcactaaacccggcccgtgcggtgattggacgcaggccccgggccgcggcggaggcgggcgatccgaaagaggctggtgctggctgcatggggaggcggcggcagcgggtggaccccgcggctggggcccgggccggggccctgcctgaggccatcgccgcgttgagtcggtcgctgccctcgggacccagccccgagatcttccgccgcgccaagttcgaccgtccggaggcgacctccgcgctctggcagctcctcttccgtgtgctctcgccactccctgcgggcaacgccttggcatcgctcgccctggggctacccgaggctggcactggcacaactacctgaggatggctcgcagggcagtcgggagctgctgctggctctgtcctggctcttggcccgaggacctgtgcccgagcagatgctggcccaggcccgagtgcctctgggtgacgagatgactgtgtgccgcaagatccacctgtacacacgcggctgccacagcgaccagagccttagccatctgtctgtcactgaagcagagatgctcagggacccagagggaggccagcagctgctgcggactctggagcgtgagaaccagcgcctggaggctgtcctggcgtggcggcgctctgagctggtcttctggcggtggatggacacggtcctgggcacctgtgccccggaggtgcctgctgcagcctcacagcccaccttcctgccctgggtccccgagcgcgggggtggcgagttggacctggtagtgcgggagctgcaggcactggaggaggagctgcgggaggctgcggagcgcaggcgggcggcctgggaggccaaggctggaggctgtggacgggggccagagtggagtgccgcgcggcgggcctctcgggaggctgtggaaaaggagctgggagctctacagcagtgctgggagcgagacggtggcccggcccagccccatgggccacaccggctggtgagacgagaggatggggcagcaggggaccgggacctgcgggcagctgtggtgatcaggacgctgaggagccaggaggcctgcctggaggcggtgctacgtcgactacagggacagtgtcggcaggaactggccaggctggtgggagcccgccctggtctcatctggatcccgccacctggacgctgagggcctgtcgacgggccctcgtgtgggaagcctgccctggcccagcctggctgggtcttggaggagcagattccaaggccaggtggccgcagggacgatgcagatgcagagcccacgtcacatgctcgctccaggggtggggctgggctgactctggccggatcccaggcctgtggctagcagcactggggacaggaatggctggtcccttgaggaggtcgtgacaggctcagcctggtggtctggaggggactcggaaataaattgtagcagctttcctgcc

SEQ ID NO: 918 - DNA, 1517 bp, Homo sapiens
atgattgggctsaggttccagccggagcggtaactgggcgcaggtcccagccgccgcactaaacccggcccgtgcggtgattggacgcaggccccgggccgcggcggaggcgggcgatccgaaagaggctggtgctggctgcatggggaggcggcggcagcgggtggaccccgcggctggggcccgggccggggccctgcctgaggccatcgccgcgttgagtcggtcgctgccctcgggacccagccccgagatcttccgccgcgccaagttcgaccgtccggaggcgacctccgcgctctggcagctcctcttccgtgtgctctcgccactccctgcgggcaacgccttggcatcgctcgccctggaggtccaagcccgcttggtgaagtcagcactatgctcccagggctacccgaggctggcactggcacaactacctgaggatggctcgcagggcagtcgggagctgctgctggctctgtcctggctcttggcccgaggacctgtgcccgagcagatgctggcccaggcccgagtgcctctgggtgacgagatgactgtgtgccagtgtgaggccctggccagccctggcccacctgcaccccacatggaagcagagggtcctgtggatgtccgccatgtgcagtggctgatgggaaagctgcggttccggtggcgccagctggtgtccagtcagcaggagcagtgcgccctcctgagctgctgcggactctggagcgtgagaaccagcgcctggaggctgtcctggcgtggcggcgctctgagctggtcttctggcggtggatggacacggtcctgggcacctgtgccccggaggtgcctgctgcagcctcacagcccaccttcctgccctgggtccccgagcgcgggggtggcgagttggacctggtagtgcgggagctgcaggcactggaggaggagctgcgggaggctgcggagcgcaggcgggcggcctgggaggccaaggctggaggctgtggacgggggccagagtggagtgccgcgcggcgggcctctcgggaggctgtggaaaaggagctgggagctctacagcagtgctgggaaacaaaaagggcgcctatgccatcctgttggcaacccccgatgtcgagcgcccaagcttgcgctaacctgaacccccgttacttgccgggattgtggggcttccatacgcatgctttcccggaaaattaggtgggagcccctgaaaggtttgacctgaccgaacatttccagaaccaacctggggagccgaatccgcccggaacggacgttcgcctcgtggccaggttatgtccccggaaactcctccggccggagaggcccagacccatggaacagcagttttttcttccgtcaatatgagtccgtaggaccgttcatttacaccaagcagcagcctcccgggtcgcgataggtcgaccccccccccgcgaggttcccatacaaggagaggttgggagccttgagtgtacctcccggtcagaagaggt

SEQ ID NO: 919 - DNA, 1677 bp, Homo sapiens
acggagggcgtgcggggagggagaggaggggcttgctggggggggggccccgaggcggggccgggagggccgcctggaagaggaggtcgggggcgaaggaggccgagaagaaagccctgccaggagcccggaagtgggtccgcacgagacagaatagactacactcaaactccaggggaaccgttcattgggcttggacacgaaggcgggaccctgccgacgcagtgattggatgcatgtccggccagcgcggtgattgagcgcggtgattgggtacaggtctcgggagcgcggtgattggacctccgcgctctggcagctcctcttccgtgtgctctcgccactccctgcgggcaacgccttggcatcgctcgccctggggctacccgaggctggcactggcacaactacctgaggatggctcgcagggcagtcgggagctgctgctggctctgtcctggctcttggcccgaggacctgtgcccgagcagatgctggcccaggcccgagtgcctctgggtgacgagatgactgtgtgccagtgtgaggccctggccagccctggcccacctgcaccccacatggaagcagagggtcctgtggatgtccgccatgtgcagtggctgatgggaaagctgcggttccggtggcgccagctggtgtccagtcagcaggagcagtgcgccctcctgagcaagatccacctgtacacacgcggctgccacagcgaccagagccttagccatctgtctgtcactgaagcagagatgctcagggacccagagggaggccagcagctgctgcggactctggagcgtgagaaccagcgcctggaggctgtcctggcgtggcggcgctctgagctggtcttctggcggtggatggacacggtcctgggcacctgtgccccggaggtgcctgctgcagcctcacagcccaccttcctgccctgggtccccgagcgcgggggtggcgagttggacctggtagtgcgggagctgcaggcactggaggaggagctgcgggaggctgcggagcgcaggcgggcggcctgggaggccaaggctggaggctgtggacgggggccagagtggagtgccgcgcggcgggcctctcgggaggctgtggaaaaggagctgggagctctacagcagtgctgggagcgagacggtggcccggcccagccccatgggccacaccggctggtgagacgagaggatggggcagcaggggaccgggacctgcgggcagctgtggtgatcaggacgctgaggagccaggaggcctgcctggaggcggtgctacgtcgactacagggacagtgtcggcaggaactggccaggctggtgggagcccgccctggtctcatctggatcccgccacctggacgctgagggcctgtcgacgggccctcgtgtgggaagcctgccctggcccagcctggctgggtcttggaggagcagattccaaggccaggtggccgcagggacgatgcagatgcagagcccacgtcacatgctcgctccaggggtggggctgggctgactctggccggatcccaggcctgtggctagcagcactggggacaggaatggctggtcccttgaggaggtcgtgacaggctcagcctggtggtctggaggggactcggaaataaattgtagcagctttcctgcc

SEQ ID NO: 920 - DNA, 1553 bp, Homo sapiens
atgattgggctsaggttccagccggagcggtaactgggcgcaggtcccagccgccgcactaaacccggcccgtgcggtgattggacgcaggccccgggccgcggcggaggcgggcgatccgaaagaggctggtgctggctgcatggggaggcggcggcagcgggtggaccccgcggctggggcccgggccggggccctgcctgaggccatcgccgcgttgagtcggtcgctgccctcgggacccagccccgagatcttccgccgcgccaagttcgaccgtccggaggcgacctccgcgctctggcagctcctcttccgtgtgctctcgccactccctgcgggcaacgccttggcatcgctcgccctggaggtccaagcccgcttggtgaagtcagcactatgctcccagggctacccgaggctggcactggcacaactacctgaggatggctcgcagggcagtcgggagctgctgctggctctgtcctggctcttggcccgaggacctgtgcccgagcagatgctggcccaggcccgagtgcctctgggtgacgagatgactgtgtgccgcaagatccacctgtacacacgcggctgccacagcgaccagagccttagccatctgtctgtcactgaagcagagatgctcagggacccagagggaggccagcagctgctgcggactctggagcgtgagaaccagcgcctggaggctgtcctggcgtggcggcgctctgagctggtcttctggcggtggatggacacggtcctgggcacctgtgccccggaggtgcctgctgcagcctcacagcccaccttcctgccctgggtccccgagcgcgggggtggcgagttggacctggtagtgcgggagctgcaggcactggaggaggagctgcgggaggctgcggagcgcaggcgggcggcctgggaggccaaggctggaggctgtggacgggggccagagtggagtgccgcgcggcgggcctctcgggaggctgtggaaaaggagctgggagctctacagcagtgctgggagcgagacggtggcccggcccagccccatgggccacaccggctggtgagacgagaggatggggcagcaggggaccgggacctgcgggcagctgtggtgatcaggacgctgaggagccaggaggcctgcctggaggcggtgctacgtcgactacagggacagtgtcggcaggaactggccaggctggtgggagcccgccctggtctcatctggatcccgccacctggacgctgagggcctgtcgacgggccctcgtgtgggaagcctgccctggcccagcctggctgggtcttggaggagcagattccaaggccaggtggccgcagggacgatgcagatgcagagcccacgtcacatgctcgctccaggggtggggctgggctgactctggccggatcccaggcctgtggctagcagcactggggacaggaatggctggtcccttgaggaggtcgtgacaggctcagcctggtggtctggaggggactcggaaataaattgtagcagctttcctgcc

SEQ ID NO: 921 - DNA, 1557 bp, Homo sapiens
  misc_feature (1)..(1557): n = a, t, g, or c
atgattgggctsaggttccagccggagcggtaactgggcgcaggtcccagccgccgcactaaacccggcccgtgcggtgattggacgcaggccccgggccgcggcggaggcgggcgatccgaaagaggctggtgctggctgcatggggaggcggcggcagcgggtggaccccgcggctggggcccgggccggggccctgcctgaggccatcgccgcgttgagtcggtcgctgccctcgggacccagccccgagatcttccgccgcgccaagttcgaccgtccggaggcgacctccgcgctctggcagctcctcttccgtgtgctctcgccactccctgcgggcaacgccttggcatcgctcgccctggaggtccaagcccgcttggtgaagtcagcactatgctcccacagctcccccaacgctgggacctcgcaccattaccgtgaagctggctcgtagggtcattcagcccccttgctgcctggctttgtccctggcctcttgggcccggagcgatttgtggctctaatcacaatgctggtcgcctgactccaaccggctctgggctgaacgagatggactgctgtgccctcccgccgccgggctctgggtccaggcccgggcccccgcctgggttttccccttttgccactcccgataggtccgctgtggaccgtacccgcccgctgtgccctgtcgtcttggcctgcggaataacctcccttgtccccccgttggtccaaccgtgctccggcgggaccattgcgcttacagggaaggcaggcggccgacattcacgcccgaaattatcccctctgttgttcccccccctcatcgtatgttgctggcttaaattaagccgctccttgtggacgtagtcgccccattggggtatgggcgagatagcccacctttaatcttggatttcccccgcaggacctaggtggctcctcgctcccgctattttccccgcggggcaatcgtgggtggccccgactacagacgtacgtcctcgcacgcgccagcgcgctatacttacgcgccggcggcttatccgttttccccgctggggactatctgcgaaattcccgccggtgtgtgtagcctaaacgttccaagcggctcgtgtgctacgcggcggcagttatttattctacgtgcgcatcctatattacggtcgcgagctatgtctattccgtgcccctatgttataccgcccttcgtgcctaacctgattctattgtggccctccgcgcccgcgcgcttatgactctcgctactatgacctctcctgtgctcgttgcacacgagcgcggttttatctgctctgaaagtccgcgccactaantctcacctcggagtacatattcatctactacataacacgtacattcccatatctaagcaccccgacttacgttcattcaccacaccgtccctcctatttattaaaatagtctgccgccgcactacgattgggcggtgtgttagttcgagattgttagttgaacgttgccccccccttatttttttccagcccccggctggtcctgatt

SEQ ID NO: 922 - DNA, 1152 bp, Homo sapiens
  misc_feature (1)..(1152): n = a, t, g, or c
atgattgggctsaggttccagccggagcggtaactgggcgcaggtcccagccgccgcactaaacccggcccgtgcggtgattggacgcaggccccgggccgcggcggaggcgggcgatccgaaagaggctggtgctggctgcatggggaggcggcggcagcgggtggaccccgcggctggggcccgggccggggccctgcctgaggccatcgccgcgttgagtcggtcgctgccctcgggacccagccccgagatcttccgccgcgccaagttcgaccgtccggaggcgacctccgcgctctggcagctcctcttccgtgtgctctcgccactccctgcgggcaacgccttggcatcgctcgccctgactggaggtccanagnncccgcttgagtgacagtancagcactaaatgctccnnncagggctacccgaggctggcactggcacaactacctgaggatggctcgcagggcagtcgggagctgctgctggctctgtcctggctcttggcccgaggacctgtgcccgagcagatgctggcccaggcccgagtgcctctgggtgacgagatgactgtgtgccagtgtgaggccctggccagccctggcccacctgcaccccacatggaagcagagggtcctgtggatgtccgccatgtgcagtggctgatgggaaagctgcggttccggtggcgccagctggtgtccagtcagcaggagcagtgcgccctcctgagcaagatccacctgtacacacgcggctgccacagcgaccagagccttagccatctgtctgtcactgaagcagagatgctcagggacccagagggaggccagcagctgctgcggactctggagcgtgagaaccagcgcctggaggctgtcctggcgtggcggcgctctgagctggtcttctggcggtgatggcacgtctgggacttgtgcccgagtggctgtgaagctaaagcacttctgctggtcccaccggtgcgattgactcggttcggcacagcctgaaagatcgaagttaacaagggctagagacaagtgtaatgtagcacaaagaccgggctccgggagaaagcacacaagagagagccaccacctaaaaaacgatgacagacgtaagacgagagaccgcaccacaggg

SEQ ID NO: 923 - DNA, 970 bp, Homo sapiens
atgattgggctsaggttccagccggagcggtaactgggcgcaggtcccagccgccgcactaaacccggcccgtgcggtgattggacgcaggccccgggccgcggcggaggcgggcgatccgaaagaggctggtgctggctgcatggggaggcggcggcagcgggtggaccccgcggctggggcccgggccggggccctgcctgaggccatcgccgcgttgagtcggtcgctgccctcgggacccagccccgagatcttccgccgcgccaagttcgaccgtccggaggcgacctccgcgctctggcagctcctcttccgtgtgctctcgccactccctgcgggcaacgccttggcatcgctcgccctggggctacccgaggctggcactggcacaactacctgaggatggctcgcagggcagtcgggagctgctgctggctctgtcctggctcttggcccgaggacctgtgcccgagcagatgctggcccaggcccgagtgcctctgggtgacgagatgactgtgtgccgcaagatccacctgtacacacgcggctgccacagcgaccagagccttagccatctgtctgtcactgaagcagagatgctcagggacccagagggaggccagcagctgctgcggactctggagcgtgagaaccagcgcctggaggctgtcctggcgtggcggcgctctgagctggtcttctggcggtggatggacacggtcctgggcacctgtgccccggaggtgcctgctgcagcctcacagcccaccttcctgccctgggtccccgagcgcgggggtggcgagttggacctggtagtgcgggagctgcaggcctggaggaagaactgcgggaagtgggacgcaggggggctggaaggcagttgaagtggaccggggccagggaagcccgcggggccctcggagtgggcagggggggccacatgtggaaaagggccccccag

1-4. (canceled)

5. A method for diagnosing cancer or a pre-cancerous condition in a mammal, comprising:
(a) obtaining a cell or tissue sample from a mammal suspected of having cancer or a pre-cancerous condition and determining for said sample the gene copy number of a gene of Table 1;
(b) comparing said gene copy number of step (a) to the gene copy number of the same gene from a sample of a corresponding cell or tissue from a mammal of the same species not having cancer of the type being diagnosed
whereby a higher gene copy number determined in step (a) relative to that in step (b) indicates the presence of a cancer or pre-cancerous condition in the mammal of step (a) and results in a diagnosis of cancer or a pre-cancerous condition in said mammal.

6. The method of claim 5 wherein said mammal is a human patient.

7. The method of claim 5 wherein said cancer is a member selected from breast cancer, colon cancer, lung cancer, prostate cancer, ovarian cancer, pancreatic cancer, cervical cancer and kidney cancer.

8. The method of claim 5 wherein the gene of Table 1 is a gene that encodes the same gene product as a polynucleotide of SEQ ID NO: 1-805 and 855-923.

9. A method of inhibiting cancer, or a pre-cancerous condition, in a mammalian cell, comprising contacting said cell with a molecule that inhibits function of a gene of Table 1.

10. The method of claim 9 wherein said gene of Table 1 is a gene that encodes the same gene product as a polynucleotide of SEQ ID NO: 1-805 and 855-923.

11. The method of claim 9 wherein said molecule inhibits gene function by binding to said gene.

12. The method of claim 9 wherein said molecule inhibits gene function by binding to an RNA encoded by said gene.

13. The method of claim 9 wherein said molecule inhibits gene function by binding to polypeptide encoded by said gene.

14. The method of claim 9 wherein said molecule is a member selected from an antisense DNA, an antisense RNA, a ribozyme and an siRNA.

15. The method of claim 9 wherein said cancer is a member selected from breast cancer, colon cancer, lung cancer, prostate cancer, ovarian cancer, pancreatic cancer, cervical cancer and kidney cancer.

16. The method of claim 9 wherein said contacting occurs in vivo.

17. A method for identifying an agent having therapeutic activity in a human patient in need of said therapeutic activity, comprising:
(a) determining in a sample from a patient the level of a gene product encoded by a gene of Table 1 prior to administering a test compound to said patient;
(b) administering said test compound to said patient;
(c) determining in a sample from said patient the level of a gene product encoded by the same the gene as in step (a)
wherein a decrease in the level of said gene product in step (c) relative to step (a) identifies said test compound as an agent having therapeutic activity.

18. The method of claim 17 wherein said therapeutic activity is anticancer activity.

19. The method of claim 17 wherein said cancer is a member selected from breast cancer, colon cancer, lung cancer, prostate cancer, ovarian cancer, pancreatic cancer, cervical cancer and kidney cancer.

20. The method of claim 17 wherein said gene product is an RNA.

21. The method of claim 17 wherein said gene product is a polypeptide.

22. The method of claim 21 wherein said determination of said polypeptide is a determination of an enzyme activity.

23. The method of claim 17 wherein said gene of Table 1 is a gene that encodes the same gene product as a polynucleotide of SEQ ID NO: 1-805 and 855-923.

24. The method of claim 17 wherein said molecule is a member selected from an antisense DNA, an antisense RNA, a ribozyme and an siRNA.

25. A method for identifying an antineoplastic agent, comprising:
(a) contacting a test compound with a cell that expresses a gene of Table 1; and
(b) determining a change in gene expression as a result of said contacting;
whereby said change in said gene expression identifies said test compound as an antineoplastic agent.

26-27. (canceled)

28. The method of claim 25 wherein said gene of Table 1 encodes the same gene product as a polynucleotide of SEQ ID NO: 1-805 and 855-923.

29. The method of claim 25 wherein said molecule is a member selected from an antisense DNA, an antisense RNA, ribozyme, an siRNA, a small organic molecule and an antibody.

30. A method for determining the cancerous status of a cell, comprising determining elevated expression in said cell of a gene of Table 1 wherein elevated expression of said gene indicates that said cell is cancerous.

31. (canceled)

32. The method of claim 30 wherein said gene of Table 1 encodes the same gene product as a polynucleotide of SEQ ID NO: 1-805 and 855-923.

33. A method for identifying a compound as an anti-neoplastic agent, comprising:
(a) contacting a test compound with a polypeptide encoded by a gene of Table 1,
(b) determining a change in a biological activity of said polypeptide due to said contacting,
wherein a change in activity identifies said test compound as an agent having antineoplastic activity.

34. The method of claim 33 wherein said gene of Table encodes the same gene product as a polynucleotide of SEQ ID NO: 1-805 and 855-923.

35. (canceled)

36. The method of claim 33 wherein said biological activity is an enzyme activity.

37-55. (canceled)

56. The method of claim 33 wherein said polypeptide is contained in a cell.

57. The method of claim 33 wherein said molecule is a member selected from antisense DNA, an antisense RNA, a ribozyme, an siRNA, a small organic molecule and an antibody.

58. The method of claim 57 wherein said antibody is specific for a polypeptide comprising an amino acid sequence of SEQ ID NO: 806 -854.

59-61. (canceled)

62. A method for treating cancer comprising contacting a cancerous cell with an agent first identified as having gene modulating activity using the method of claim 25, 33, or 58 and in an amount effective to cause a reduction in cancerous activity of said cell.

63-66. (canceled)

67. A method for treating cancer comprising contacting a cancerous cell with an agent having affinity for an expression product of a gene of Table 1 and in an amount effective to cause a reduction in cancerous activity of said cell.

68. The method of claim 67 wherein said expression product is a polypeptide.

69. The method of claim 67 wherein said molecule is a member selected from antisense DNA, an antisense RNA, a ribozyme, an siRNA, a small organic molecule and an antibody.

70. The method of claim 69 wherein said antibody is specific for a polypeptide comprising an amino acid sequence selected from SEQ ID NO: 806-854.

71. A method for monitoring the progress of cancer therapy in a patient comprising monitoring in a patient undergoing cancer therapy the expression of a gene of Table 1.

72. The method of claim 71 wherein said gene encodes the same gene product as a polynucleotide of SEQ ID NO: 1-805 and 855-923.

73-74. (canceled)

75. A method for determining the likelihood of success of cancer therapy in a patient, comprising monitoring in a patient undergoing cancer therapy the expression of a gene of Table 1 wherein a decrease in said expression prior to completion of said cancer therapy is indicative of a likelihood of success of said cancer therapy.

76. The method of claim 75 wherein said gene encodes the same gene product as a polynucleotide of SEQ ID NO: 1-805 and 855-923.

77-78. (canceled)

79. A method for producing test data with respect to the anti-neoplastic activity of a compound comprising:
(a) identifying a test compound as having anti-neoplastic activity using a method of claim 25;
(b) producing test data with respect to the anti-neoplastic activity of said test compound sufficient to identify the chemical structure of said test compound.

80. A method for producing test data with respect to the anti-neoplastic activity of a compound comprising:
(a) identifying a test compound as having anti-neoplastic activity using a method of claim 33;
(b) producing test data with respect to the anti-neoplastic activity of said test compound sufficient to identify the chemical structure of said test compound.

81. A method for determining the progress of a treatment for cancer in a patient afflicted therewith, following commencement of a cancer treatment on said patient, comprising:
(a) determining in said patient a change in expression of one or more genes of Table 1; and
(b) determining a change in expression of said gene compared to expression of said one or more determined genes prior to said cancer treatment;
wherein said change in expression indicates progress of said treatment thereby determining the progress of said treatment.

82. The method of claim 81 wherein said change in expression is a decrease in expression and said decrease indicates success of said treatment.

83. The method of claim 81 wherein said gene encodes the same gene product as a polynucleotide of SEQ ID NO: 1-805 and 855-923.
